(19) United States
(12) Patent Application Publication
(10) Pub. No.: US 2025/0171854 A1
(43) Pub. Date: May 29, 2025

(54) GENETIC SIGNATURES TO PREDICT PROSTATE CANCER METASTASIS AND IDENTIFY TUMOR AGGRESSIVENESS

(71) Applicant: Veracyte, Inc., South San Francisco, CA (US)

(72) Inventors: Elai Davicioni, La Jolla, CA (US); Nicholas Erho, Vancouver (CA); Hussam Al-Deen Ashab, Vancouver (CA); Mohammed Alshalalfa, New Westminster (CA)

(21) Appl. No.: 18/824,789

(22) Filed: Sep. 4, 2024

Related U.S. Application Data
(63) Continuation of application No. 17/390,674, filed on Jul. 30, 2021, now abandoned.
Application No. 17/390,674 is a continuation of application No. 15/977,249, filed on May 11, 2018, now Pat. No. 11,078,542.
(60) Provisional application No. 62/505,665, filed on May 12, 2017.

(51) Int. Cl. C12Q 1/6886

(52) U.S. Cl. CPC C12Q 1/6886; C12Q 2600/112; C12Q 2600/118; C12Q 2600/158

(57) ABSTRACT

The present invention relates to methods, systems and kits for the diagnosis, prognosis and the determination of cancer progression of prostate cancer in a subject. The invention also provides clinically useful genomic classifiers for predicting prostate cancer metastasis and identifying tumor aggressiveness. The methods, systems and kits can provide expression-based analysis of biomarkers for purposes of predicting metastatic disease and lethal prostate cancer in a subject. Further disclosed herein, in certain instances, are probe sets for use in predicting prostate cancer metastasis in a subject. Classifiers for predicting prostate cancer metastasis are provided. Methods of treating cancer based on tumor aggressiveness are also provided. The methods and classifiers of the present invention are also useful for predicting early prostate cancer metastasis.

### CROSS-REFERENCE TO RELATED APPLICATIONS

[0001] This application is a continuation of U.S. patent application Ser. No. 17/390,674, filed Jul. 30, 2021 which is a continuation of U.S. patent application Ser. No. 15/977,249, filed May 11, 2018, now U.S. Pat. No. 11,078,542, entitled “GENETIC SIGNATURES TO PREDICT PROSTATE CANCER METASTASIS AND IDENTIFY TUMOR AGGRESSIVENESS”, which claims priority to the U.S. Provisional Patent Application Ser. No. 62/505,665, filed on May 12, 2017, which is hereby incorporated by reference herein in its entirety.

### INCORPORATION OF SEQUENCE LISTING

[0002] The material in the accompanying sequence listing is hereby incorporated by reference into this application. The accompanying sequence listing XML file, named GENDX_001C2.xml, was created on Sep. 4, 2024, and is 1,822,832 bytes in size. The file can be assessed using Microsoft Word on a computer that uses Windows OS.

### FIELD OF THE INVENTION

[0003] The present invention relates to methods, systems and kits for the diagnosis, prognosis and the determination of cancer progression of prostate cancer in a subject. The invention also provides clinically useful genomic classifiers for predicting prostate cancer metastasis and identifying tumor aggressiveness. The methods, systems and kits can provide expression-based analysis of biomarkers for purposes of predicting metastatic disease and lethal prostate cancer in a subject. Further disclosed herein, in certain instances, are probe sets for use in predicting prostate cancer metastasis in a subject. Classifiers for predicting prostate cancer metastasis are provided. Methods of treating cancer based on tumor aggressiveness are also provided. The methods and classifiers of the present invention are also useful for predicting early prostate cancer metastasis.

### BACKGROUND OF THE INVENTION

[0004] Cancer is the uncontrolled growth of abnormal cells anywhere in a body. The abnormal cells are termed cancer cells, malignant cells, or tumor cells. Many cancers and the abnormal cells that compose the cancer tissue are further identified by the name of the tissue that the abnormal cells originated from (for example, prostate cancer). Cancer cells can proliferate uncontrollably and form a mass of cancer cells. Cancer cells can break away from this original mass of cells, travel through the blood and lymph systems, and lodge in other organs where they can again repeat the uncontrolled growth cycle. This process of cancer cells leaving an area and growing in another body area is often termed metastatic spread or metastatic disease. For example, if prostate cancer cells spread to a bone (or anywhere else), it can mean that the individual has metastatic prostate cancer.

[0005] Standard clinical parameters such as tumor size, grade, lymph node involvement and tumor-node-metastasis (TNM) staging (American Joint Committee on Cancer http://www.cancerstaging.org) may correlate with outcome and serve to stratify patients with respect to (neo)adjuvant chemotherapy, immunotherapy, antibody therapy and/or radiotherapy regimens. Incorporation of molecular markers in clinical practice may define tumor subtypes that are more likely to respond to targeted therapy. However, stage-matched tumors grouped by histological or molecular subtypes may respond differently to the same treatment regimen. Additional key genetic and epigenetic alterations may exist with important etiological contributions. A more detailed understanding of the molecular mechanisms and regulatory pathways at work in cancer cells and the tumor microenvironment (TME) could dramatically improve the design of novel anti-tumor drugs and inform the selection of optimal therapeutic strategies. For example, methods that enable the identification of aggressive tumors would ensure that those patients are adequately treated for their cancer, while patients with low risk tumors could avoid unnecessary cancer treatment. The development and implementation of diagnostic, prognostic and therapeutic biomarkers to characterize the biology of each tumor may assist clinicians in making important decisions with regard to individual patient care and treatment. Thus, provided herein are methods, systems and kits for the diagnosis, prognosis and the determination of cancer progression of cancer in a subject. The invention also provides biomarkers that identify aggressive prostate cancer, clinically useful classifiers for predicting prostate cancer metastasis, bioinformatic methods for determining clinically useful classifiers, and methods of use of each of the foregoing. The methods, systems and kits can provide expression-based analysis of biomarkers for purposes of predicting prostate cancer metastasis in a subject. Further disclosed herein, in certain instances, are probe sets for use in predicting prostate cancer metastasis in a subject. Classifiers for predicting prostate cancer metastasis are provided. Methods of treating cancer based on tumor aggressiveness are also provided. The methods and classifiers of the present invention are also useful for predicting early prostate cancer metastasis.

[0006] This background information is provided for the purpose of making known information believed by the applicant to be of possible relevance to the present invention. No admission is necessarily intended, nor should be construed, that any of the preceding information constitutes prior art against the present invention.

### SUMMARY OF THE INVENTION

[0007] The present invention relates to methods, systems and kits for the diagnosis, prognosis and the determination of cancer progression of cancer in a subject. The invention also provides biomarkers that define subgroups of prostate cancer, clinically useful classifiers for predicting prostate cancer aggressiveness and metastasis, bioinformatic methods for determining clinically useful classifiers, and methods of use of each of the foregoing. The methods, systems and kits can provide expression-based analysis of biomarkers for purposes of prognosing and diagnosing prostate cancer in a subject. Further disclosed herein, in certain instances, are probe sets for use in prognosing and diagnosing prostate cancer in a subject. Classifiers for prognosing and diagnosing a prostate cancer are provided. Methods of treating cancer based on prognosis and/or diagnosis according to the present invention are also provided.

[0008] In one embodiment, the present invention provides a method comprising: obtaining a biological sample from a subject; and detecting the presence or assaying an expression level in the sample from the subject for a plurality of target sequences, wherein the plurality of target sequences is selected from Table 1 or SEQ ID NOs: 1-1815. In some embodiments, the plurality of target sequences comprises a coding and/or non-coding target. In other embodiments, the coding target is an exonic sequence. In yet other embodiments, non-coding target comprises an intronic sequence, partially overlaps an intronic sequence, a sequence within the UTR or partially overlaps with a UTR sequence. In other embodiments, the plurality of target sequences comprises a nucleic acid sequence. In still other embodiments, the nucleic acid sequence is a DNA sequence or an RNA sequence. In some embodiments, the plurality of target sequences comprises at least 5, 10, 15, 20, 25, 30, 35, 40, 45, 50, 55 or 60 target sequences selected from Table 1 or SEQ ID NOs: 1-1815. In some embodiments, the subject has cancer. In other embodiments, the cancer is selected from the group consisting of skin cancer, lung cancer, colon cancer, pancreatic cancer, prostate cancer, liver cancer, thyroid cancer, ovarian cancer, uterine cancer, breast cancer, cervical cancer, kidney cancer, epithelial carcinoma, squamous carcinoma, basal cell carcinoma, melanoma, papilloma, and adenomas. In yet other embodiments, the cancer is prostate cancer. In still other embodiments, the methods further comprise administering a treatment to the subject. In some embodiments, the treatment is selected from the group consisting of surgery, chemotherapy, radiation therapy, immunotherapy/biological therapy, and photodynamic therapy. In other embodiments, the biological sample is a biopsy. In yet other embodiments, the biological sample is a urine sample, a blood sample or a prostate tumor sample. In certain embodiments, the blood sample is plasma, serum, or whole blood. In other embodiments, the subject is a human.

[0009] In another embodiment, the present invention provides methods of diagnosing, prognosing and determining cancer progression of cancer in a subject comprising obtaining a biological sample from a subject; and detecting the presence or assaying an expression level in the sample from the subject for a plurality of target sequences, wherein the plurality of target sequences is selected from Table 1 or SEQ ID NOs: 1-1815, thereby diagnosing, prognosing and determining cancer progression of cancer in the subject. In some embodiments, the plurality of target sequences comprises a coding and/or non-coding target. In other embodiments, the coding target is an exonic sequence. In yet other embodiments, non-coding target comprises an intronic sequence, partially overlaps an intronic sequence, a sequence within the UTR or partially overlaps with a UTR sequence. In other embodiments, the plurality of target sequences comprises a nucleic acid sequence. In still other embodiments, the nucleic acid sequence is a DNA sequence or an RNA sequence. In some embodiments, the plurality of target sequences comprises at least 5, 10, 15, 20, 25, 30, 35, 40, 45, 50, 55 or 60 target sequences selected from Table 1 or SEQ ID NOs: 1-1815. In some embodiments, the subject has cancer. In other embodiments, the cancer is selected from the group consisting of skin cancer, lung cancer, colon cancer, pancreatic cancer, prostate cancer, liver cancer, thyroid cancer, ovarian cancer, uterine cancer, breast cancer, cervical cancer, kidney cancer, epithelial carcinoma, squamous carcinoma, basal cell carcinoma, melanoma, papilloma, and adenomas. In yet other embodiments, the cancer is prostate cancer. In still other embodiments, the methods further comprise administering a treatment to the subject. In some embodiments, the treatment is selected from the group consisting of surgery, chemotherapy, radiation therapy, immunotherapy/biological therapy, and photodynamic therapy. In other embodiments, the biological sample is a biopsy. In yet other embodiments, the biological sample is a urine sample, a blood sample or a prostate tumor sample. In certain embodiments, the blood sample is plasma, serum, or whole blood. In other embodiments, the subject is a human.

[0010] In other embodiments, the present invention provides methods of determining a treatment regimen for a subject having cancer comprising: obtaining a biological sample from a subject having cancer; assaying an expression level in a sample from the subject for a plurality of target sequences, wherein the plurality of target sequences is selected from Table 1 or SEQ ID NOs: 1-1815; and determining the treatment regimen for the subject. In other embodiments, the expression level is increased or reduced compared to a control. In still other embodiments, the assaying an expression level comprises performing in situ hybridization, a PCR-based method, an array-based method, an immunohistochemical method, an RNA assay method, or an immunoassay method. In other embodiments, the assaying an expression level comprises using a reagent selected from the group consisting of a nucleic acid probe, one or more nucleic acid primers, and an antibody. In yet other embodiments, the assaying an expression level comprises assaying the level of an RNA transcript. In other embodiments, the method further comprises administering at least one cancer treatment selected from the group consisting of surgery, radiation therapy, immunotherapy, biological therapy, neoadjuvant chemotherapy, and photodynamic therapy after androgen deprivation therapy.

[0011] In other embodiments, the present invention provides kits for predicting cancer aggressiveness or risk of metastasis, the kit comprising agents for assaying an expression level of a plurality of genes, wherein said plurality of genes comprises one or more genes selected from Table 1 or SEQ ID NOs: 1-1815. In certain embodiments, the kit comprises agents for assaying an expression level of the genes listed in Table 1. In certain aspects, the agents comprise reagents for performing in situ hybridization, a PCR-based method, an array-based method, an immunohistochemical method, an RNA assay method, or an immunoassay method. In other aspects, the agents comprise one or more of a microarray, a nucleic acid probe, a nucleic acid primer, or an antibody. In certain embodiments, the kit comprises at least one set of PCR primers capable of amplifying a nucleic acid comprising a sequence of a gene selected from Table 1 or its complement. In other embodiments, the kit comprises at least one probe capable of hybridizing to a nucleic acid comprising a sequence of a gene selected from Table 1 or its complement. In yet other embodiments, the kits further comprise one or more control reference samples.

[0012] In one embodiment, the present invention provides a probe set for prognosing or diagnosing cancer in a subject, the probe set comprising a plurality of probes for detecting a plurality of target nucleic acids, wherein the plurality of target nucleic acids comprises one or more gene sequences, or complements thereof, of genes selected from Table 1. In one aspect, at least one probe is detectably labeled.

[0013] In other embodiments, the present invention provides methods for treating a subject with cancer, the method comprising: a) obtaining a biological sample from a subject having cancer; b) detecting the presence or assaying the expression level in the biological sample for a plurality of targets selected from Table 1 or SEQ ID NOs: 1-1815; and c) administering a treatment to the subject. In some embodiments, the treatment is selected from the group consisting of surgery, chemotherapy, radiation therapy, immunotherapy, biological therapy, hormonal therapy, and photodynamic therapy. In other embodiments, the cancer is prostate cancer.

[0014] In one embodiment, the present invention provides a method comprising: a) obtaining a biological sample from a subject; and b) detecting the presence or assaying the expression level in the biological sample for a plurality of targets selected from the group consisting of AC020571.3, ANO7, ARL6IP1P2, ASPN, AZGP1, AZGP1P1, DEGS1, ERO1LB, FBXL8, FMO5, FTH1P2, FTH1P8, GLB1L2, GLB1L3, GLYATL1P3, GMNN, HIF3A, INHBA, KIAA1210, KRT15, LIPH, LPAR3, LPGAT1, MIR4435-1HG, MKI67, MLLT11, MYBPC1, NADK2, NR4A1, NUSAPI, OR51A6P, PABPC1, PART1, PCAT14, PGM5P4-AS1, PICK1, PTTG1, R3HDM1, RNA5SP121, RP11-121G22.3 RP11-159H20.3, RP11-755011.2, RP11-770G2.5, RP11-923I11.3, RP13-753N3.3, RPL31P57, SCIN, SESN3, SETP14, SLC22A3, SMC4, TIPARP, TMEM100, TNFRSF19, TOP2A, TPX2, TRIQK, VBP1, WFDC2, and XPO6. In one aspect, the plurality of target sequences comprises a coding and/or non-coding target. In some embodiments, the plurality of target sequences comprises a coding and/or non-coding target. In other embodiments, the coding target is an exonic sequence. In yet other embodiments, non-coding target comprises an intronic sequence, partially overlaps an intronic sequence, a sequence within the UTR or partially overlaps with a UTR sequence. In other embodiments, the plurality of target sequences comprises a nucleic acid sequence. In still other embodiments, the nucleic acid sequence is a DNA sequence or an RNA sequence. In some embodiments, the plurality of target sequences comprises at least 5, 10, 15, 20, 25, 30, 35, 40, 45, 50, 55 or 60 target sequences selected from Table 1 or SEQ ID NOs: 1-1815. In some embodiments, the subject has cancer. In other embodiments, the cancer is selected from the group consisting of skin cancer, lung cancer, colon cancer, pancreatic cancer, prostate cancer, liver cancer, thyroid cancer, ovarian cancer, uterine cancer, breast cancer, cervical cancer, kidney cancer, epithelial carcinoma, squamous carcinoma, basal cell carcinoma, melanoma, papilloma, and adenomas. In yet other embodiments, the cancer is prostate cancer. In still other embodiments, the methods further comprise administering a treatment to the subject. In some embodiments, the treatment is selected from the group consisting of surgery, chemotherapy, radiation therapy, immunotherapy/biological therapy, and photodynamic therapy. In other embodiments, the biological sample is a biopsy. In yet other embodiments, the biological sample is a urine sample, a blood sample or a prostate tumor sample. In certain embodiments, the blood sample is plasma, serum, or whole blood. In other embodiments, the subject is a human.

[0015] The plurality of targets may comprise one or more targets selected from AC020571.3, ANO7, ARL6IP1P2, ASPN, AZGP1, AZGP1P1, DEGS1, ERO1LB, FBXL8, FMO5, FTH1P2, FTH1P8, GLB1L2, GLB1L3, GLYATL1P3, GMNN, HIF3A, INHBA, KIAA1210, KRT15, LIPH, LPAR3, LPGAT1, MIR4435-1HG, MKI67, MLLT11, MYBPC1, NADK2, NR4A1, NUSAPI, OR51A6P, PABPC1, PART1, PCAT14, PGM5P4-AS1, PICK1, PTTG1, R3HDM1, RNA5SP121, RP11-121G22.3 RP11-159H20.3, RP11-755011.2, RP11-770G2.5, RP11-923111.3, RP13-753N3.3, RPL31P57, SCIN, SESN3, SETP14, SLC22A3, SMC4, TIPARP, TMEM100, TNFRSF19, TOP2A, TPX2, TRIQK, VBP1, WFDC2, and XPO6; TIPARP and TMEM100; SETP14, MLLT11, and INHBA; ANO7, NR4A1, PART1, PCAT-14, SLC22A3, and TIPARP; FBXL8, MKI67, NUSAPI, PTTG1, TOP2A, and TPX2; ASPN, AZGP1, KRT15, MYBPC1, PICK1, TRIQK, and WFDC2; DEGS1, ERO1LB, FMO5, GLB1L2, GLB1L3, GLYATL1P3, LIPH, LPGAT1, NADK2, and XPO6; GMNN, SESN3, SMC4, and VBP1; HIF3A; INHBA, R3HDM1, and TNFRSF19; LPAR3 and SCIN; LOC101927482, ARL6IP1P2, AZGP1P1, FTH1P2, FTH1P8, KIAA1210, MIR4435-1HG, OR51A6P, PGMSP4-AS1, RNA5SP121, RP11-121G22.3, RP11-159H20.3, RP11-755011.2, RP11-77062.5, RP11-92311.3, and RP13-753N3.3; ANO7, NR4A1, and PART1; PCAT-14, SLC22A3, and TIPARP; FBXL8, MKI67, and NUSAPI; PTTG1, TOP2A, and TPX2; ASPN, AZGP1, and KRT15; MYBPC1, PICK1, TRIQK, and WFDC2; DEGS1, ERO1LB, and FMO5; GLB1L2, GLB1L3, and GLYATL1P3; LIPH, LPGAT1, NADK2, and XPO6; GMNN and SESN3; SMC4 and VBP1; INHBA and R3HDM1; INHBA and TNFRSF19; LPAR3 and SCIN; LOC101927482 and ARL6IP1P2; AZGP1P1 and FTH1P2; FTH1P8 and KIAA1210; MIR4435-1HG and OR51A6P; PGMSP4-AS1 and RNA5SP121; RP11-121G22.3 and RP11-159H20.3; RP11-755011.2 and RP11-77062.5; RP11-923111.3 and RP13-753N3.3; AC020571.3 and ANO7; ARL6IP1P2 and ASPN; AZGP1 and AZGP1P1; DEGS1 and ERO1LB; FBXL8 and FMO5; FTH1P2 and FTH1P8; GLB1L2 and GLB1L3; GLYATL1P3 and GMNN; HIF3A and INHBA; KIAA1210 and KRT15; LIPH and LPAR3; LPGAT1 and MIR4435-1HG; MKI67 and MLLT11; MYBPC1 and NADK2; NR4A1 and NUSAPI; OR51A6P and PABPC1; PART1 and PCAT14; PGM5P4-AS1 and PICK1; PTTG1 and R3HDM1; RNA5SP121 and RP11-121G22.3; RP11-159H20.3 and RP11-755011.2; RP11-770G2.5 and RP11-923I11.3; RP13-753N3.3 and RPL31P57; SCIN and SESN3; SETP14 and SLC22A3; SMC4 and TIPARP; TMEM100 and TNFRSF19; TOP2A and TPX2; TRIQK and VBP1; WFDC2 and XPO6; TIPARP and TMEM100.

[0016] In one embodiment, the present invention provides a method comprising: a) obtaining a biological sample from a subject having prostate cancer and b) detecting the presence or expression level in the biological sample for a plurality of targets selected from Table 1 or SEQ ID NOs: 1-1815. In some embodiments, the method further comprises treating the prostate cancer in the subject according to a genomic classifier score based on the presence or expression levels of the plurality of targets.

[0017] In some embodiments, the present invention also provides a method of diagnosing, prognosing, assessing the risk of recurrence or predicting benefit from therapy in a subject with prostate cancer, comprising: providing a biological sample comprising prostate cancer cells from the subject; assaying an expression level in the biological sample from the subject for a plurality of targets using at least one reagent that specifically binds to said targets, wherein the plurality of targets comprises one or more targets selected from Table 1 or SEQ ID NOs: 1-1815; and diagnosing, prognosing, assessing the risk of recurrence or predicting benefit from therapy in the subject based on the expression levels of the plurality of targets. In some embodiments, the expression level of the target is reduced expression of the target. In other embodiments, the expression level of said target is increased expression of said target. In yet other embodiments, the level of expression of said target is determined by using a method selected from the group consisting of in situ hybridization, a PCR-based method, an array-based method, an immunohistochemical method, an RNA assay method and an immunoassay method. In other embodiments, the reagent is selected from the group consisting of a nucleic acid probe, one or more nucleic acid primers, and an antibody. In other embodiments, the target comprises a nucleic acid sequence.

[0018] In some embodiments, the present invention provides a system for analyzing a cancer, comprising, a probe set comprising a plurality of target sequences, wherein the plurality of target sequences hybridizes to one or more targets selected from Table 1 or SEQ ID NOs: 1-1815; or the plurality of target sequences comprises one or more targets selected from Table 1 or SEQ ID NOs: 1-1815; and a computer model or algorithm for analyzing an expression level and/or expression profile of the target hybridized to the probe in a sample from a subject suffering from prostate cancer. In some embodiments, the method further comprises a label that specifically binds to the target, the probe, or a combination thereof.

[0019] In some embodiments, the present invention provides a method comprising: (a) providing a biological sample from a subject with prostate cancer; (b) detecting the presence or expression level in the biological sample for a plurality of targets, wherein the plurality of targets comprises one or more targets selected from Table 1 or SEQ ID NOs: 1-1815; (c) generating a genomic classifier score based on the presence or expression levels of the plurality of targets; and (d) administering a treatment to the subject, wherein the treatment is selected from the group consisting of surgery, chemotherapy, radiation therapy, immunotherapy/biological therapy, hormonal therapy, and photodynamic therapy. In some embodiments, the present invention provides a method of treating a subject with prostate cancer, comprising: providing a biological sample comprising prostate cancer cells from the subject; determining the level of expression or amplification of at least one or more targets selected from Table 1 or SEQ ID NOs: 1-1815 using at least one reagent that specifically binds to said targets; generating a genomic classifier score based on the level of expression or amplification of the at least one or more targets; and prescribing a treatment regimen based on the genomic classifier score.

[0020] In some embodiments, the present invention provides a kit for analyzing a prostate cancer, comprising, a probe set comprising a plurality of target sequences, wherein the plurality of target sequences comprises at least one target sequence listed in Table 1 or SEQ ID NOs: 1-1815; and a computer model or algorithm for analyzing an expression level and/or expression profile of the target sequences in a sample. In some embodiments, the method further comprises a computer model or algorithm for correlating the expression level or expression profile with disease state or outcome. In other embodiments, the method further comprises a computer model or algorithm for designating a treatment modality for the individual. In yet other embodiments, the method further comprises a computer model or algorithm for normalizing expression level or expression profile of the target sequences. In some embodiments, the method further comprises sequencing the plurality of targets. In some embodiments, the method further comprises hybridizing the plurality of targets to a solid support. In some embodiments, the solid support is a bead or array. In some embodiments, assaying the expression level of a plurality of targets may comprise the use of a probe set. In some embodiments, assaying the expression level may comprise the use of a classifier. The classifier may comprise a probe selection region (PSR). In some embodiments, the classifier may comprise the use of an algorithm. The algorithm may comprise a machine learning algorithm. In some embodiments, assaying the expression level may also comprise sequencing the plurality of targets.

[0021] Further disclosed herein methods for using genomic classifiers for prognosing and/or diagnosing prostate cancer, wherein the genomic classifier has an AUC value of at least about 0.40 to predict patient outcomes. In some embodiments, patient outcomes are selected from the group consisting of biochemical recurrence (BCR), metastasis (MET) and prostate cancer death (PCSM) after radical prostatectomy. The AUC of the genomic classifier may be at least about 0.40, 0.45, 0.50, 0.55, 0.60, 0.61, 0.62, 0.63, 0.64, 0.65, 0.66, 0.67, 0.68, 0.69, 0.70 or more.

[0022] Further disclosed herein is a method for using genomic classifiers for prognosing and/or diagnosing prostate cancer, comprising determining the level of expression or amplification of at least one or more targets of the present invention, wherein the significance of the expression level of the one or more targets is based on one or more metrics selected from the group comprising T-test, P-value, KS (Kolmogorov Smirnov) P-value, accuracy, accuracy P-value, positive predictive value (PPV), negative predictive value (NPV), sensitivity, specificity, AUC, AUC P-value (Auc.pvalue), Wilcoxon Test P-value, Median Fold Difference (MFD), Kaplan Meier (KM) curves, survival AUC (survAUC), Kaplan Meier P-value (KM P-value), Univariable Analysis Odds Ratio P-value (uvaORPval), multivariable analysis Odds Ratio P-value (mvaORPval), Univariable Analysis Hazard Ratio P-value (uvaHRPval) and Multivariable Analysis Hazard Ratio P-value (mvaHRPval). The significance of the expression level of the one or more targets may be based on two or more metrics selected from the group comprising AUC, AUC P-value (Auc.pvalue), Wilcoxon Test P-value, Median Fold Difference (MFD), Kaplan Meier (KM) curves, survival AUC (survAUC), Univariable Analysis Odds Ratio P-value (uvaORPval), multivariable analysis Odds Ratio P-value (mvaORPval), Kaplan Meier P-value (KM P-value), Univariable Analysis Hazard Ratio P-value (uvaHRPval) and Multivariable Analysis Hazard Ratio P-value (mvaHRPval). The molecular subtypes of the present invention are useful for predicting clinical characteristics of subjects with prostate cancer. In some embodiments, the clinical characteristics are selected from the group consisting of seminal vesical invasion (SVI), lymph node invasion (LNI), prostate-specific antigen (PSA), and gleason score (GS).

### INCORPORATION BY REFERENCE

[0023] All publications, patents, and patent applications mentioned in this specification are herein incorporated by reference in their entireties to the same extent as if each individual publication, patent, or patent application was specifically and individually indicated to be incorporated by reference.

### BRIEF DESCRIPTION OF THE DRAWINGS

[0024] FIGS. 1A-B set forth data showing correlation of genomic classifiers with biopsy Grade Groups and NCCN risk categories.

[0025] FIGS. 2A-C set forth data showing correlation of genomic classifiers with diagnostic PSA, clinical stage and percentage of positive cores.

[0026] FIGS. 3A-B set forth data showing correlation of genomic classifier with pathological tumor grade and stage.

[0027] FIG. 4 sets forth data showing genomic classifier correlation with prospective RP and biopsy tumor specimens across tumor Grade Groups.

[0028] FIG. 5 sets forth data showing the distribution of genomic classifier scores among cases where tumor grading changed.

[0029] FIGS. 6A-C set forth data showing correlation of genomic classifiers with Gleason scores after pathological re-review in 1,694 biopsy samples.

[0030] FIGS. 7A-B set forth data showing genomic classifier scores for composite endpoint: High Stage Disease (LNI or pT3b) for biopsy samples.

[0031] FIG. 8 sets forth data showing AUC for predicting LNI for various genomic classifiers.

### DETAILED DESCRIPTION OF THE INVENTION

[0032] The present invention discloses systems and methods for diagnosing, predicting, and/or monitoring the status or outcome of a prostate cancer in a subject using expression-based analysis of a plurality of targets. Generally, the method comprises (a) optionally obtaining a sample from a subject; (b) assaying the expression level for a plurality of targets in the sample; and (c) diagnosing, predicting and/or monitoring the status or outcome of a prostate cancer based on the expression level of the plurality of targets.

[0033] Assaying the expression level for a plurality of targets in the sample may comprise applying the sample to a microarray. In some instances, assaying the expression level may comprise the use of an algorithm. The algorithm may be used to produce a classifier and subsequently a classifier score. Alternatively, the classifier may comprise a probe selection region. In some instances, assaying the expression level for a plurality of targets comprises detecting and/or quantifying the plurality of targets. In some embodiments, assaying the expression level for a plurality of targets comprises sequencing the plurality of targets. In some embodiments, assaying the expression level for a plurality of targets comprises amplifying the plurality of targets. In some embodiments, assaying the expression level for a plurality of targets comprises quantifying the plurality of targets. In some embodiments, assaying the expression level for a plurality of targets comprises conducting a multiplexed reaction on the plurality of targets.

[0034] In some instances, the plurality of targets comprises one or more targets selected from Table 1 or SEQ ID NOs: 1-1815. In some instances, the plurality of targets comprises at least about 2, at least about 3, at least about 4, at least about 5, at least about 6, at least about 7, at least about 8, at least about 9, at least about 10, at least about 20, at least about 30, at least about 40, at least about 50, or at least about 60 targets selected from Table 1 or SEQ ID NOs: 1-1815.

[0035] Further disclosed herein are methods for prognosing or diagnosing prostate cancer. Generally, the method comprises: (a) obtaining a sample comprising prostate cancer cells from a subject; (b) assaying the expression level for a plurality of targets in the sample; and (c) prognosing or diagnosing the cancer based on the expression level of the plurality of targets. In some instances, the plurality of targets comprises one or more targets selected from Table 1 or SEQ ID NOs: 1-1815. In some instances, the plurality of targets comprises at least about 2, at least about 3, at least about 4, at least about 5, at least about 6, at least about 7, at least about 8, at least about 9, at least about 10, at least about 20, at least about 30, at least about 40, at least about 50, or at least about 60 targets selected from Table 1 or SEQ ID NOs: 1-1815.

[0036] In some instances, prognosing or diagnosing the prostate cancer comprises determining whether the cancer is aggressive or will metastasize. Alternatively, prognosing or diagnosing the prostate cancer comprises identifying the cancer as non-responsive to an anti-cancer therapy. Optionally, prognosing or diagnosing the prostate cancer comprises identifying the cancer as responsive to an anti-cancer therapy.

[0037] Before the present invention is described in further detail, it is to be understood that this invention is not limited to the particular methodology, compositions, articles or machines described, as such methods, compositions, articles or machines can, of course, vary. It is also to be understood that the terminology used herein is for the purpose of describing particular embodiments only, and is not intended to limit the scope of the present invention.

### Targets

[0038] The methods disclosed herein often comprise assaying the expression level of a plurality of targets. The plurality of targets may comprise coding targets and/or non-coding targets of a protein-coding gene or a non protein-coding gene. A protein-coding gene structure may comprise an exon and an intron. The exon may further comprise a coding sequence (CDS) and an untranslated region (UTR). The protein-coding gene may be transcribed to produce a pre-mRNA and the pre-mRNA may be processed to produce a mature mRNA. The mature mRNA may be translated to produce a protein.

[0039] A non protein-coding gene structure may comprise an exon and intron. Usually, the exon region of a non protein-coding gene primarily contains a UTR. The non protein-coding gene may be transcribed to produce a pre-mRNA and the pre-mRNA may be processed to produce a non-coding RNA (ncRNA).

[0040] A coding target may comprise a coding sequence of an exon. A non-coding target may comprise a UTR sequence of an exon, intron sequence, intergenic sequence, promoter sequence, non-coding transcript, CDS antisense, intronic antisense, UTR antisense, or non-coding transcript antisense. A non-coding transcript may comprise a non-coding RNA (ncRNA).

[0041] In some instances, the plurality of targets may be differentially expressed. In some instances, a plurality of probe selection regions (PSRs) is differentially expressed.

[0042] In some instances, the plurality of targets comprises one or more targets selected from at least about 10, at least about 20, at least about 30, at least about 40, at least about 50, or at least about 60 targets selected from Table 1 or SEQ ID NOs: 1-1815. In some instances, the plurality of targets comprises at least about 2, at least about 3, at least about 4, at least about 5, at least about 6, at least about 7, at least about 8, at least about 9, at least about 10, at least about 20, at least about 30, at least about 40, at least about 50, or at least about 60 targets selected from Table 1 or SEQ ID NOs: 1-1815.

[0043] In some instances, the plurality of targets comprises a coding target, non-coding target, or any combination thereof. In some instances, the coding target comprises an exonic sequence. In other instances, the non-coding target comprises a non-exonic or exonic sequence. Alternatively, a non-coding target comprises a UTR sequence, an intronic sequence, antisense, or a non-coding RNA transcript. In some instances, a non-coding target comprises sequences which partially overlap with a UTR sequence or an intronic sequence. A non-coding target also includes non-exonic and/or exonic transcripts. Exonic sequences may comprise regions on a protein-coding gene, such as an exon, UTR, or a portion thereof. Non-exonic sequences may comprise regions on a protein-coding, non protein-coding gene, or a portion thereof. For example, non-exonic sequences may comprise intronic regions, promoter regions, intergenic regions, a non-coding transcript, an exon anti-sense region, an intronic anti-sense region, UTR anti-sense region, non-coding transcript anti-sense region, or a portion thereof. In other instances, the plurality of targets comprises a non-coding RNA transcript.

[0044] The plurality of targets may comprise one or more targets selected from a classifier disclosed herein. The classifier may be generated from one or more models or algorithms. The one or more models or algorithms may be Naïve Bayes (NB), recursive Partitioning (Rpart), random forest (RF), support vector machine (SVM), k-nearest neighbor (KNN), high dimensional discriminate analysis (HDDA), or a combination thereof. The classifier may have an AUC of equal to or greater than 0.60. The classifier may have an AUC of equal to or greater than 0.61. The classifier may have an AUC of equal to or greater than 0.62. The classifier may have an AUC of equal to or greater than 0.63. The classifier may have an AUC of equal to or greater than 0.64. The classifier may have an AUC of equal to or greater than 0.65. The classifier may have an AUC of equal to or greater than 0.66. The classifier may have an AUC of equal to or greater than 0.67. The classifier may have an AUC of equal to or greater than 0.68. The classifier may have an AUC of equal to or greater than 0.69. The classifier may have an AUC of equal to or greater than 0.70. The classifier may have an AUC of equal to or greater than 0.75. The classifier may have an AUC of equal to or greater than 0.77. The classifier may have an AUC of equal to or greater than 0.78. The classifier may have an AUC of equal to or greater than 0.79. The classifier may have an AUC of equal to or greater than 0.80. The AUC may be clinically significant based on its 95% confidence interval (CI). The accuracy of the classifier may be at least about 70%. The accuracy of the classifier may be at least about 73%. The accuracy of the classifier may be at least about 75%. The accuracy of the classifier may be at least about 77%. The accuracy of the classifier may be at least about 80%. The accuracy of the classifier may be at least about 83%. The accuracy of the classifier may be at least about 84%. The accuracy of the classifier may be at least about 86%. The accuracy of the classifier may be at least about 88%. The accuracy of the classifier may be at least about 90%. The p-value of the classifier may be less than or equal to 0.05. The p-value of the classifier may be less than or equal to 0.04. The p-value of the classifier may be less than or equal to 0.03. The p-value of the classifier may be less than or equal to 0.02. The p-value of the classifier may be less than or equal to 0.01. The p-value of the classifier may be less than or equal to 0.008. The p-value of the classifier may be less than or equal to 0.006. The p-value of the classifier may be less than or equal to 0.004. The p-value of the classifier may be less than or equal to 0.002. The p-value of the classifier may be less than or equal to 0.001.

[0045] The plurality of targets may comprise one or more targets selected from a Random Forest (RF) classifier. The plurality of targets may comprise two or more targets selected from a Random Forest (RF) classifier. The plurality of targets may comprise three or more targets selected from a Random Forest (RF) classifier. The plurality of targets may comprise 2, 3, 4, 5, 6, 7, 8, 9, 10, 11, 12, 13, 14, 15, 20, 25, 30, 40, 50, 60 or more targets selected from a Random Forest (RF) classifier. The RF classifier may be an RF2, and RF3, or an RF4 classifier. The RF classifier may be an RF60 classifier (e.g., a Random Forest classifier with 50 targets).

[0046] A RF classifier of the present invention may comprise two or more targets comprising two or more targets selected from Table 1 or SEQ ID NOs: 1-1815.

[0047] The plurality of targets may comprise one or more targets selected from an SVM classifier. The plurality of targets may comprise 2, 3, 4, 5, 6, 7, 8, 9, 10, 11, 12, 13, 14, 15, 20, 25, 30, 40, 50, 60 or more targets selected from an SVM classifier. The plurality of targets may comprise 12, 13, 14, 15, 17, 20, 22, 25, 27, 30, 40, 50, 60 or more targets selected from an SVM classifier. The plurality of targets may comprise 32, 35, 37, 40, 43, 45, 47, 50, 60 or more targets selected from an SVM classifier. The SVM classifier may be an SVM2 classifier.

[0048] A SVM classifier of the present invention may comprise two or more targets comprising two or more targets selected from Table 1 or SEQ ID NOs: 1-1815.

[0049] The plurality of targets may comprise one or more targets selected from a KNN classifier. The plurality of targets may comprise 2, 3, 4, 5, 6, 7, 8, 9, 10 or more targets selected from a KNN classifier. The plurality of targets may comprise 12, 13, 14, 15, 17, 20, 22, 25, 27, 30 or more targets selected from a KNN classifier. The plurality of targets may comprise 32, 35, 37, 40, 43, 45, 47, 50, 60 or more targets selected from a KNN classifier.

[0050] The KNN classifier may be a KNN50 classifier. A KNN classifier of the present invention may comprise sixty or more targets comprising sixty or more targets selected from Table 1 or SEQ ID NOs: 1-1815.

[0051] The plurality of targets may comprise one or more targets selected from a Naïve Bayes (NB) classifier. The plurality of targets may comprise 2, 3, 4, 5, 6, 7, 8, 9, 10 or more targets selected from an NB classifier. The plurality of targets may comprise 12, 13, 14, 15, 17, 20, 22, 25, 27, 30 or more targets selected from an NB classifier. The plurality of targets may comprise 32, 35, 37, 40, 43, 45, 47, 50, 60 or more targets selected from a NB classifier.

[0052] The NB classifier may be a NB2 classifier. An NB classifier of the present invention may comprise two or more targets comprising two or more targets selected from Table 1 or SEQ ID NOs: 1-1815.

[0053] The plurality of targets may comprise one or more targets selected from a recursive Partitioning (Rpart) classifier. The plurality of targets may comprise 2, 3, 4, 5, 6, 7, 8, 9, 10 or more targets selected from an Rpart classifier. The plurality of targets may comprise 12, 13, 14, 15, 17, 20, 22, 25, 27, 30 or more targets selected from an Rpart classifier. The plurality of targets may comprise 32, 35, 37, 40, 43, 45, 47, 50, 60 or more targets selected from an Rpart classifier.

[0054] The Rpart classifier may be an Rpart2 classifier. An Rpart classifier of the present invention may comprise two or more targets comprising two or more targets selected from Table 1 or SEQ ID NOs: 1-1815.

[0055] The plurality of targets may comprise one or more targets selected from a high dimensional discriminate analysis (HDDA) classifier. The plurality of targets may comprise two or more targets selected from a high dimensional discriminate analysis (HDDA) classifier. The plurality of targets may comprise three or more targets selected from a high dimensional discriminate analysis (HDDA) classifier. The plurality of targets may comprise 5, 6, 7, 8, 9, 10, 11, 12, 13, 14, 15, 20, 30, 40, 50, 60 or more targets selected from a high dimensional discriminate analysis (HDDA) classifier.

### Probes/Primers

[0056] The present invention provides for a probe set for diagnosing, monitoring and/or predicting a status or outcome of a prostate cancer in a subject comprising a plurality of probes, wherein (i) the probes in the set are capable of detecting an expression level of at least one target selected from Table 1 or SEQ ID NOs: 1-1815; and (ii) the expression level determines the cancer status of the subject with at least about 40% specificity.

[0057] The probe set may comprise one or more polynucleotide probes. Individual polynucleotide probes comprise a nucleotide sequence derived from the nucleotide sequence of the target sequences or complementary sequences thereof. The nucleotide sequence of the polynucleotide probe is designed such that it corresponds to, or is complementary to the target sequences. The polynucleotide probe can specifically hybridize under either stringent or lowered stringency hybridization conditions to a region of the target sequences, to the complement thereof, or to a nucleic acid sequence (such as a cDNA) derived therefrom.

[0058] The selection of the polynucleotide probe sequences and determination of their uniqueness may be carried out in silico using techniques known in the art, for example, based on a BLASTN search of the polynucleotide sequence in question against gene sequence databases, such as the Human Genome Sequence, UniGene, dbEST or the non-redundant database at NCBI. In one embodiment of the invention, the polynucleotide probe is complementary to a region of a target mRNA derived from a target sequence in the probe set. Computer programs can also be employed to select probe sequences that may not cross hybridize or may not hybridize non-specifically.

[0059] In some instances, microarray hybridization of RNA, extracted from prostate cancer tissue samples and amplified, may yield a dataset that is then summarized and normalized by the fRMA technique. After removal (or filtration) of cross-hybridizing PSRs, and PSRs containing less than 4 probes, the remaining PSRs can be used in further analysis. Following fRMA and filtration, the data can be decomposed into its principal components and an analysis of variance model is used to determine the extent to which a batch effect remains present in the first 10 principal components.

[0060] These remaining PSRs can then be subjected to filtration by a T-test between CR (clinical recurrence) and non-CR samples. Using a p-value cut-off of 0.01, the remaining features (e.g., PSRs) can be further refined. Feature selection can be performed by regularized logistic regression using the elastic-net penalty. The regularized regression may be bootstrapped over 1000 times using all training data; with each iteration of bootstrapping, features that have non-zero co-efficient following 3-fold cross validation can be tabulated. In some instances, features that were selected in at least 25% of the total runs were used for model building.

[0061] The polynucleotide probes of the present invention may range in length from about 15 nucleotides to the full length of the coding target or non-coding target. In one embodiment of the invention, the polynucleotide probes are at least about 15 nucleotides in length. In another embodiment, the polynucleotide probes are at least about 20 nucleotides in length. In a further embodiment, the polynucleotide probes are at least about 25 nucleotides in length. In another embodiment, the polynucleotide probes are between about 15 nucleotides and about 500 nucleotides in length. In other embodiments, the polynucleotide probes are between about 15 nucleotides and about 450 nucleotides, about 15 nucleotides and about 400 nucleotides, about 15 nucleotides and about 350 nucleotides, about 15 nucleotides and about 300 nucleotides, about 15 nucleotides and about 250 nucleotides, about 15 nucleotides and about 200 nucleotides in length. In some embodiments, the probes are at least 15 nucleotides in length. In some embodiments, the probes are at least 15 nucleotides in length. In some embodiments, the probes are at least 20 nucleotides, at least 25 nucleotides, at least 50 nucleotides, at least 75 nucleotides, at least 100 nucleotides, at least 125 nucleotides, at least 150 nucleotides, at least 200 nucleotides, at least 225 nucleotides, at least 250 nucleotides, at least 275 nucleotides, at least 300 nucleotides, at least 325 nucleotides, at least 350 nucleotides, at least 375 nucleotides in length.

[0062] The polynucleotide probes of a probe set can comprise RNA, DNA, RNA or DNA mimetics, or combinations thereof, and can be single-stranded or double-stranded. Thus the polynucleotide probes can be composed of naturally-occurring nucleobases, sugars and covalent internucleoside (backbone) linkages as well as polynucleotide probes having non-naturally-occurring portions which function similarly. Such modified or substituted polynucleotide probes may provide desirable properties such as, for example, enhanced affinity for a target gene and increased stability. The probe set may comprise a coding target and/or a non-coding target. Preferably, the probe set comprises a combination of a coding target and non-coding target.

[0063] In some embodiments, the probe set comprise a plurality of target sequences that hybridize to at least about 5 coding targets and/or non-coding targets selected from Table 1 or SEQ ID NOs: 1-1815. Alternatively, the probe set comprise a plurality of target sequences that hybridize to at least about 10 coding targets and/or non-coding targets selected from Table 1 or SEQ ID NOs: 1-1815. In some embodiments, the probe set comprise a plurality of target sequences that hybridize to at least about 15 coding targets and/or non-coding targets selected from Table 1 or SEQ ID NOs: 1-1815. In some embodiments, the probe set comprise a plurality of target sequences that hybridize to at least about 20 coding targets and/or non-coding targets selected from Table 1 or SEQ ID NOs: 1-1815. In some embodiments, the probe set comprise a plurality of target sequences that hybridize to at least about 30 coding targets and/or non-coding targets selected from Table 1 or SEQ ID NOs: 1-1815. In some embodiments, the probe set comprise a plurality of target sequences that hybridize to at least about 40 coding targets and/or non-coding targets selected from Table 1 or SEQ ID NOs: 1-1815. In some embodiments, the probe set comprise a plurality of target sequences that hybridize to at least about 50 coding targets and/or non-coding targets selected from Table 1 or SEQ ID NOs: 1-1815. In some embodiments, the probe set comprise a plurality of target sequences that hybridize to at least about 60 coding targets and/or non-coding targets selected from Table 1 or SEQ ID NOs: 1-1815.

[0064] The system of the present invention further provides for primers and primer pairs capable of amplifying target sequences defined by the probe set, or fragments or subsequences or complements thereof. The nucleotide sequences of the probe set may be provided in computer-readable media for in silico applications and as a basis for the design of appropriate primers for amplification of one or more target sequences of the probe set.

[0065] Primers based on the nucleotide sequences of target sequences can be designed for use in amplification of the target sequences. For use in amplification reactions such as PCR, a pair of primers can be used. The exact composition of the primer sequences is not critical to the invention, but for most applications the primers may hybridize to specific sequences of the probe set under stringent conditions, particularly under conditions of high stringency, as known in the art. The pairs of primers are usually chosen so as to generate an amplification product of at least about 50 nucleotides, more usually at least about 100 nucleotides. Algorithms for the selection of primer sequences are generally known, and are available in commercial software packages. These primers may be used in standard quantitative or qualitative PCR-based assays to assess transcript expression levels of RNAs defined by the probe set. Alternatively, these primers may be used in combination with probes, such as molecular beacons in amplifications using real-time PCR.

[0066] In one embodiment, the primers or primer pairs, when used in an amplification reaction, specifically amplify at least a portion of a nucleic acid sequence of a target selected from Table 1 or SEQ ID NOs: 1-1815 (or subgroups thereof as set forth herein), an RNA form thereof, or a complement to either thereof.

[0067] A label can optionally be attached to or incorporated into a probe or primer polynucleotide to allow detection and/or quantitation of a target polynucleotide representing the target sequence of interest. The target polynucleotide may be the expressed target sequence RNA itself, a cDNA copy thereof, or an amplification product derived therefrom, and may be the positive or negative strand, so long as it can be specifically detected in the assay being used. Similarly, an antibody may be labeled.

[0068] In certain multiplex formats, labels used for detecting different targets may be distinguishable. The label can be attached directly (e.g., via covalent linkage) or indirectly, e.g., via a bridging molecule or series of molecules (e.g., a molecule or complex that can bind to an assay component, or via members of a binding pair that can be incorporated into assay components, e.g. biotin-avidin or streptavidin). Many labels are commercially available in activated forms which can readily be used for such conjugation (for example through amine acylation), or labels may be attached through known or determinable conjugation schemes, many of which are known in the art.

[0069] Labels useful in the invention described herein include any substance which can be detected when bound to or incorporated into the biomolecule of interest. Any effective detection method can be used, including optical, spectroscopic, electrical, piezoelectrical, magnetic, Raman scattering, surface plasmon resonance, colorimetric, calorimetric, etc. A label is typically selected from a chromophore, a lumiphore, a fluorophore, one member of a quenching system, a chromogen, a hapten, an antigen, a magnetic particle, a material exhibiting nonlinear optics, a semiconductor nanocrystal, a metal nanoparticle, an enzyme, an antibody or binding portion or equivalent thereof, an aptamer, and one member of a binding pair, and combinations thereof. Quenching schemes may be used, wherein a quencher and a fluorophore as members of a quenching pair may be used on a probe, such that a change in optical parameters occurs upon binding to the target introduce or quench the signal from the fluorophore. One example of such a system is a molecular beacon. Suitable quencher/fluorophore systems are known in the art. The label may be bound through a variety of intermediate linkages. For example, a polynucleotide may comprise a biotin-binding species, and an optically detectable label may be conjugated to biotin and then bound to the labeled polynucleotide. Similarly, a polynucleotide sensor may comprise an immunological species such as an antibody or fragment, and a secondary antibody containing an optically detectable label may be added.

[0070] Chromophores useful in the methods described herein include any substance which can absorb energy and emit light. For multiplexed assays, a plurality of different signaling chromophores can be used with detectably different emission spectra. The chromophore can be a lumophore or a fluorophore. Typical fluorophores include fluorescent dyes, semiconductor nanocrystals, lanthanide chelates, polynucleotide-specific dyes and green fluorescent protein.

[0071] In some embodiments, polynucleotides of the invention comprise at least 20 consecutive bases of the nucleic acid sequence of a target selected from Table 1 or SEQ ID NOs: 1-1815 or a complement thereto. The polynucleotides may comprise at least 21, 22, 23, 24, 25, 27, 30, 32, 35 or more consecutive bases of the nucleic acids sequence of a target selected from Table 1 or SEQ ID NOs: 1-1815, as applicable.

[0072] The polynucleotides may be provided in a variety of formats, including as solids, in solution, or in an array. The polynucleotides may optionally comprise one or more labels, which may be chemically and/or enzymatically incorporated into the polynucleotide.

[0073] In some embodiments, one or more polynucleotides provided herein can be provided on a substrate. The substrate can comprise a wide range of material, either biological, nonbiological, organic, inorganic, or a combination of any of these. For example, the substrate may be a polymerized Langmuir Blodgett film, functionalized glass, Si, Ge, GaAs, GaP, SiO₂, SiN₄, modified silicon, or any one of a wide variety of gels or polymers such as (poly)tetrafluoroethylene, (poly)vinylidenedifluoride, polystyrene, cross-linked polystyrene, polyacrylic, polylactic acid, polyglycolic acid, poly(lactide coglycolide), polyanhydrides, poly(methyl methacrylate), poly(ethylene-co-vinyl acetate), polysiloxanes, polymeric silica, latexes, dextran polymers, epoxies, polycarbonates, or combinations thereof. Conducting polymers and photoconductive materials can be used.

[0074] The substrate can take the form of an array, a photodiode, an optoelectronic sensor such as an optoelectronic semiconductor chip or optoelectronic thin-film semiconductor, or a biochip. The location(s) of probe(s) on the substrate can be addressable; this can be done in highly dense formats, and the location(s) can be microaddressable or nanoaddressable.

### Diagnostic Samples

[0075] Diagnostic samples for use with the systems and in the methods of the present invention comprise nucleic acids suitable for providing RNAs expression information. In principle, the biological sample from which the expressed RNA is obtained and analyzed for target sequence expression can be any material suspected of comprising prostate cancer tissue or cells. The diagnostic sample can be a biological sample used directly in a method of the invention. Alternatively, the diagnostic sample can be a sample prepared from a biological sample.

[0076] In one embodiment, the sample or portion of the sample comprising or suspected of comprising cancer tissue or cells can be any source of biological material, including cells, tissue or fluid, including bodily fluids. Non-limiting examples of the source of the sample include an aspirate, a needle biopsy, a cytology pellet, a bulk tissue preparation or a section thereof obtained for example by surgery or autopsy, lymph fluid, blood, plasma, serum, tumors, and organs. In some embodiments, the sample is from urine. Alternatively, the sample is from blood, plasma or serum. In some embodiments, the sample is from saliva.

[0077] The samples may be archival samples, having a known and documented medical outcome, or may be samples from current patients whose ultimate medical outcome is not yet known.

[0078] In some embodiments, the sample may be dissected prior to molecular analysis. The sample may be prepared via macrodissection of a bulk tumor specimen or portion thereof, or may be treated via microdissection, for example via Laser Capture Microdissection (LCM).

[0079] The sample may initially be provided in a variety of states, as fresh tissue, fresh frozen tissue, fine needle aspirates, and may be fixed or unfixed. Frequently, medical laboratories routinely prepare medical samples in a fixed state, which facilitates tissue storage. A variety of fixatives can be used to fix tissue to stabilize the morphology of cells, and may be used alone or in combination with other agents. Exemplary fixatives include crosslinking agents, alcohols, acetone, Bouin's solution, Zenker solution, Helv solution, osmic acid solution and Carnoy solution.

[0080] Crosslinking fixatives can comprise any agent suitable for forming two or more covalent bonds, for example an aldehyde. Sources of aldehydes typically used for fixation include formaldehyde, paraformaldehyde, glutaraldehyde or formalin. Preferably, the crosslinking agent comprises formaldehyde, which may be included in its native form or in the form of paraformaldehyde or formalin. One of skill in the art would appreciate that for samples in which crosslinking fixatives have been used special preparatory steps may be necessary including for example heating steps and proteinase-k digestion; see methods.

[0081] One or more alcohols may be used to fix tissue, alone or in combination with other fixatives. Exemplary alcohols used for fixation include methanol, ethanol and isopropanol.

[0082] Formalin fixation is frequently used in medical laboratories. Formalin comprises both an alcohol, typically methanol, and formaldehyde, both of which can act to fix a biological sample.

[0083] Whether fixed or unfixed, the biological sample may optionally be embedded in an embedding medium. Exemplary embedding media used in histology including paraffin, Tissue-Tek® V.I.P.™, Paramat, Paramat Extra, Paraplast, Paraplast X-tra, Paraplast Plus, Peel Away Paraffin Embedding Wax, Polyester Wax, Carbowax Polyethylene Glycol, Polyfin™, Tissue Freezing Medium TFMFM, Cryo-Gef™, and OCT Compound (Electron Microscopy Sciences, Hatfield, PA). Prior to molecular analysis, the embedding material may be removed via any suitable techniques, as known in the art. For example, where the sample is embedded in wax, the embedding material may be removed by extraction with organic solvent(s), for example xylenes. Kits are commercially available for removing embedding media from tissues. Samples or sections thereof may be subjected to further processing steps as needed, for example serial hydration or dehydration steps.

[0084] In some embodiments, the sample is a fixed, wax-embedded biological sample. Frequently, samples from medical laboratories are provided as fixed, wax-embedded samples, most commonly as formalin-fixed, paraffin embedded (FFPE) tissues.

[0085] Whatever the source of the biological sample, the target polynucleotide that is ultimately assayed can be prepared synthetically (in the case of control sequences), but typically is purified from the biological source and subjected to one or more preparative steps. The RNA may be purified to remove or diminish one or more undesired components from the biological sample or to concentrate it. Conversely, where the RNA is too concentrated for the particular assay, it may be diluted.

### RNA Extraction

[0086] RNA can be extracted and purified from biological samples using any suitable technique. A number of techniques are known in the art, and several are commercially available (e.g., FormaPure nucleic acid extraction kit, Agencourt Biosciences, Beverly MA, High Pure FFPE RNA Micro Kit, Roche Applied Science, Indianapolis, IN). RNA can be extracted from frozen tissue sections using TRIzol (Invitrogen, Carlsbad, CA) and purified using RNeasy Protect kit (Qiagen, Valencia, CA). RNA can be further purified using DNAse I treatment (Ambion, Austin, TX) to eliminate any contaminating DNA. RNA concentrations can be made using a Nanodrop ND-1000 spectrophotometer (Nanodrop Technologies, Rockland, DE). RNA can be further purified to eliminate contaminants that interfere with cDNA synthesis by cold sodium acetate precipitation. RNA integrity can be evaluated by running electropherograms, and RNA integrity number (RIN, a correlative measure that indicates intactness of mRNA) can be determined using the RNA 6000 PicoAssay for the Bioanalyzer 2100 (Agilent Technologies, Santa Clara, CA).

### Kits

[0087] Kits for performing the desired method(s) are also provided, and comprise a container or housing for holding the components of the kit, one or more vessels containing one or more nucleic acid(s), and optionally one or more vessels containing one or more reagents. The reagents include those described in the composition of matter section above, and those reagents useful for performing the methods described, including amplification reagents, and may include one or more probes, primers or primer pairs, enzymes (including polymerases and ligases), intercalating dyes, labeled probes, and labels that can be incorporated into amplification products.

[0088] In some embodiments, the kit comprises primers or primer pairs specific for those subsets and combinations of target sequences described herein. The primers or pairs of primers suitable for selectively amplifying the target sequences. The kit may comprise at least two, three, four or five primers or pairs of primers suitable for selectively amplifying one or more targets. The kit may comprise at least 5, 10, 15, 20, 30, 40, 50, 60, 70, 80, 90, 100 or more primers or pairs of primers suitable for selectively amplifying one or more targets.

[0089] In some embodiments, the primers or primer pairs of the kit, when used in an amplification reaction, specifically amplify a non-coding target, coding target, exonic, or non-exonic target described herein, a nucleic acid sequence corresponding to a target selected from Table 1 or SEQ ID NOs: 1-1815, an RNA form thereof, or a complement to either thereof. The kit may include a plurality of such primers or primer pairs which can specifically amplify a corresponding plurality of different amplify a non-coding target, coding target, exonic, or non-exonic transcript described herein, a nucleic acid sequence corresponding to a target selected from Table 1 or SEQ ID NOs: 1-1815, RNA forms thereof, or complements thereto. At least two, three, four or five primers or pairs of primers suitable for selectively amplifying the one or more targets can be provided in kit form. In some embodiments, the kit comprises from five to fifty primers or pairs of primers suitable for amplifying the one or more targets.

[0090] The reagents may independently be in liquid or solid form. The reagents may be provided in mixtures. Control samples and/or nucleic acids may optionally be provided in the kit. Control samples may include tissue and/or nucleic acids obtained from or representative of tumor samples from patients showing no evidence of disease, as well as tissue and/or nucleic acids obtained from or representative of tumor samples from patients that develop systemic cancer.

[0091] The nucleic acids may be provided in an array format, and thus an array or microarray may be included in the kit. The kit optionally may be certified by a government agency for use in prognosing the disease outcome of cancer patients and/or for designating a treatment modality.

[0092] Instructions for using the kit to perform one or more methods of the invention can be provided with the container, and can be provided in any fixed medium. The instructions may be located inside or outside the container or housing, and/or may be printed on the interior or exterior of any surface thereof. A kit may be in multiplex form for concurrently detecting and/or quantitating one or more different target polynucleotides representing the expressed target sequences.

### Amplification and Hybridization

[0093] Following sample collection and nucleic acid extraction, the nucleic acid portion of the sample comprising RNA that is or can be used to prepare the target polynucleotide(s) of interest can be subjected to one or more preparative reactions. These preparative reactions can include in vitro transcription (IVT), labeling, fragmentation, amplification and other reactions. mRNA can first be treated with reverse transcriptase and a primer to create cDNA prior to detection, quantitation and/or amplification; this can be done in vitro with purified mRNA or in situ, e.g., in cells or tissues affixed to a slide.

[0094] By “amplification” is meant any process of producing at least one copy of a nucleic acid, in this case an expressed RNA, and in many cases produces multiple copies. An amplification product can be RNA or DNA, and may include a complementary strand to the expressed target sequence. DNA amplification products can be produced initially through reverse translation and then optionally from further amplification reactions. The amplification product may include all or a portion of a target sequence, and may optionally be labeled. A variety of amplification methods are suitable for use, including polymerase-based methods and ligation-based methods. Exemplary amplification techniques include the polymerase chain reaction method (PCR), the lipase chain reaction (LCR), ribozyme-based methods, self-sustained sequence replication (3SR), nucleic acid sequence-based amplification (NASBA), the use of Q Beta replicase, reverse transcription, nick translation, and the like.

[0095] Asymmetric amplification reactions may be used to preferentially amplify one strand representing the target sequence that is used for detection as the target polynucleotide. In some cases, the presence and/or amount of the amplification product itself may be used to determine the expression level of a given target sequence. In other instances, the amplification product may be used to hybridize to an array or other substrate comprising sensor polynucleotides which are used to detect and/or quantitate target sequence expression.

[0096] The first cycle of amplification in polymerase-based methods typically forms a primer extension product complementary to the template strand. If the template is single-stranded RNA, a polymerase with reverse transcriptase activity is used in the first amplification to reverse transcribe the RNA to DNA, and additional amplification cycles can be performed to copy the primer extension products. The primers for a PCR must, of course, be designed to hybridize to regions in their corresponding template that can produce an amplifiable segment; thus, each primer must hybridize so that its 3′ nucleotide is paired to a nucleotide in its complementary template strand that is located 3′ from the 3′ nucleotide of the primer used to replicate that complementary template strand in the PCR.

[0097] The target polynucleotide can be amplified by contacting one or more strands of the target polynucleotide with a primer and a polymerase having suitable activity to extend the primer and copy the target polynucleotide to produce a full-length complementary polynucleotide or a smaller portion thereof. Any enzyme having a polymerase activity that can copy the target polynucleotide can be used, including DNA polymerases, RNA polymerases, reverse transcriptases, enzymes having more than one type of polymerase or enzyme activity. The enzyme can be thermolabile or thermostable. Mixtures of enzymes can also be used. Exemplary enzymes include: DNA polymerases such as DNA Polymerase I (“Pol I”), the Klenow fragment of Pol I, T4, T7, Sequenase® T7, Sequenase® Version 2.0 T7, Tub, Taq, Tth, Pfic, Pfu, Tsp, Tfl, Tli and Pyrococcus sp GB-D DNA polymerases; RNA polymerases such as E. coli, SP6, T3 and T7 RNA polymerases; and reverse transcriptases such as AMV, M-MuLV, MMLV, RNAse H MMLV (SuperScript®), SuperScript® II, ThermoScript®, HIV-1, and RAV2 reverse transcriptases. All of these enzymes are commercially available. Exemplary polymerases with multiple specificities include RAV2 and Tli (exo-) polymerases. Exemplary thermostable polymerases include Tub, Taq, Tth, Pfic, Pfu, Tsp, Tfl, Tli and Pyrococcus sp. GB-D DNA polymerases.

[0098] Suitable reaction conditions are chosen to permit amplification of the target polynucleotide, including pH, buffer, ionic strength, presence and concentration of one or more salts, presence and concentration of reactants and cofactors such as nucleotides and magnesium and/or other metal ions (e.g., manganese), optional cosolvents, temperature, thermal cycling profile for amplification schemes comprising a polymerase chain reaction, and may depend in part on the polymerase being used as well as the nature of the sample. Cosolvents include formamide (typically at from about 2 to about 10%), glycerol (typically at from about 5 to about 10%), and DMSO (typically at from about 0.9 to about 10%). Techniques may be used in the amplification scheme in order to minimize the production of false positives or artifacts produced during amplification. These include “touchdown” PCR, hot-start techniques, use of nested primers, or designing PCR primers so that they form stem-loop structures in the event of primer-dimer formation and thus are not amplified. Techniques to accelerate PCR can be used, for example centrifugal PCR, which allows for greater convection within the sample, and comprising infrared heating steps for rapid heating and cooling of the sample. One or more cycles of amplification can be performed. An excess of one primer can be used to produce an excess of one primer extension product during PCR; preferably, the primer extension product produced in excess is the amplification product to be detected. A plurality of different primers may be used to amplify different target polynucleotides or different regions of a particular target polynucleotide within the sample.

[0099] An amplification reaction can be performed under conditions which allow an optionally labeled sensor polynucleotide to hybridize to the amplification product during at least part of an amplification cycle. When the assay is performed in this manner, real-time detection of this hybridization event can take place by monitoring for light emission or fluorescence during amplification, as known in the art.

[0100] Where the amplification product is to be used for hybridization to an array or microarray, a number of suitable commercially available amplification products are available. These include amplification kits available from NuGEN, Inc. (San Carlos, CA), including the WT-Ovation™ System, WT-Ovation™ System v2, WT-Ovation™ Pico System, WT-Ovation™ FFPE Exon Module, WT-Ovation™ FFPE Exon Module RiboAmp and RiboAmp^{Plus} RNA Amplification Kits (MDS Analytical Technologies (formerly Arcturus) (Mountain View, CA), Genisphere, Inc. (Hatfield, PA), including the RampUp Plus™ and SenseAmp™ RNA Amplification kits, alone or in combination. Amplified nucleic acids may be subjected to one or more purification reactions after amplification and labeling, for example using magnetic beads (e.g., RNAClean magnetic beads, Agencourt Biosciences).

[0101] Multiple RNA biomarkers can be analyzed using real-time quantitative multiplex RT-PCR platforms and other multiplexing technologies such as GenomeLab GeXP Genetic Analysis System (Beckman Coulter, Foster City, CA), SmartCycler® 9600 or GeneXpert® Systems (Cepheid, Sunnyvale, CA), ABI 7900 HT Fast Real Time PCR system (Applied Biosystems, Foster City, CA), LightCycler® 480 System (Roche Molecular Systems, Pleasanton, CA), xMAP 100 System (Luminex, Austin, TX) Solexa Genome Analysis System (Illumina, Hayward, CA), OpenArray Real Time qPCR (BioTrove, Woburn, MA) and BeadXpress System (Illumina, Hayward, CA).

Detection and/or Quantification of Target Sequences

[0102] Any method of detecting and/or quantitating the expression of the encoded target sequences can in principle be used in the invention. The expressed target sequences can be directly detected and/or quantitated, or may be copied and/or amplified to allow detection of amplified copies of the expressed target sequences or its complement.

[0103] Methods for detecting and/or quantifying a target can include Northern blotting, sequencing, array or microarray hybridization, by enzymatic cleavage of specific structures (e.g., an Invader® assay, Third Wave Technologies, e.g. as described in U.S. Pat. Nos. 5,846,717, 6,090,543; 6,001,567; 5,985,557; and 5,994,069) and amplification methods, e.g. RT-PCR, including in a TaqMan® assay (PE Biosystems, Foster City, Calif., e.g. as described in U.S. Pat. Nos. 5,962,233 and 5,538,848), and may be quantitative or semi-quantitative, and may vary depending on the origin, amount and condition of the available biological sample. Combinations of these methods may also be used. For example, nucleic acids may be amplified, labeled and subjected to microarray analysis.

[0104] In some instances, target sequences may be detected by sequencing. Sequencing methods may comprise whole genome sequencing or exome sequencing. Sequencing methods such as Maxim-Gilbert, chain-termination, or high-throughput systems may also be used. Additional, suitable sequencing techniques include classic dideoxy sequencing reactions (Sanger method) using labeled terminators or primers and gel separation in slab or capillary, sequencing by synthesis using reversibly terminated labeled nucleotides, pyrosequencing, 454 sequencing, allele specific hybridization to a library of labeled oligonucleotide probes, sequencing by synthesis using allele specific hybridization to a library of labeled clones that is followed by ligation, real time monitoring of the incorporation of labeled nucleotides during a polymerization step, and SOLiD sequencing.

[0105] Additional methods for detecting and/or quantifying a target include single-molecule sequencing (e.g., Helicos, PacBio), sequencing by synthesis (e.g., Illumina, Ion Torrent), sequencing by ligation (e.g., ABI SOLID), sequencing by hybridization (e.g., Complete Genomics), in situ hybridization, bead-array technologies (e.g., Luminex xMAP, Illumina BeadChips), branched DNA technology (e.g., Panomics, Genisphere). Sequencing methods may use fluorescent (e.g., Illumina) or electronic (e.g., Ion Torrent, Oxford Nanopore) methods of detecting nucleotides.

### Reverse Transcription for ORT-PCR Analysis

[0106] Reverse transcription can be performed by any method known in the art. For example, reverse transcription may be performed using the Omniscript kit (Qiagen, Valencia, CA), Superscript III kit (Invitrogen, Carlsbad, CA), for RT-PCR. Target-specific priming can be performed in order to increase the sensitivity of detection of target sequences and generate target-specific cDNA.

### TaqMan® Gene Expression Analysis

[0107] TaqMan®RT-PCR can be performed using Applied Biosystems Prism (ABI) 7900 HT instruments in a 5 1.11 volume with target sequence-specific cDNA equivalent to 1 ng total RNA.

[0108] Primers and probes concentrations for TaqMan analysis are added to amplify fluorescent amplicons using PCR cycling conditions such as 95° C. for 10 minutes for one cycle, 95° C. for 20 seconds, and 60° C. for 45 seconds for 40 cycles. A reference sample can be assayed to ensure reagent and process stability. Negative controls (e.g., no template) should be assayed to monitor any exogenous nucleic acid contamination.

### Classification Arrays

[0109] The present invention contemplates that a probe set or probes derived therefrom may be provided in an array format. In the context of the present invention, an “array” is a spatially or logically organized collection of polynucleotide probes. An array comprising probes specific for a coding target, non-coding target, or a combination thereof may be used. Alternatively, an array comprising probes specific for two or more of transcripts of a target selected from Table 1 or SEQ ID NOs: 1-1815 or a product derived thereof can be used. Desirably, an array may be specific for 5, 10, 15, 20, 25, 30, 40, 50 or more of transcripts of a target selected from Table 1 or SEQ ID NOs: 1-1815. Expression of these sequences may be detected alone or in combination with other transcripts. In some embodiments, an array is used which comprises a wide range of sensor probes for prostate-specific expression products, along with appropriate control sequences. In some instances, the array may comprise the Human Exon 1.0 ST Array (HuEx 1.0 ST, Affymetrix, Inc., Santa Clara, CA.).

[0110] Typically the polynucleotide probes are attached to a solid substrate and are ordered so that the location (on the substrate) and the identity of each are known. The polynucleotide probes can be attached to one of a variety of solid substrates capable of withstanding the reagents and conditions necessary for use of the array. Examples include, but are not limited to, polymers, such as (poly)tetrafluoroethylene, (poly)vinylidenedifluoride, polystyrene, polycarbonate, polypropylene and polystyrene; ceramic; silicon; silicon dioxide; modified silicon; (fused) silica, quartz or glass; functionalized glass; paper, such as filter paper; diazotized cellulose; nitrocellulose filter; nylon membrane; and polyacrylamide gel pad. Substrates that are transparent to light are useful for arrays that may be used in an assay that involves optical detection.

[0111] Examples of array formats include membrane or filter arrays (for example, nitrocellulose, nylon arrays), plate arrays (for example, multiwell, such as a 24-, 96-, 256-, 384-, 864- or 1536-well, microtitre plate arrays), pin arrays, and bead arrays (for example, in a liquid “slurry”). Arrays on substrates such as glass or ceramic slides are often referred to as chip arrays or “chips.” Such arrays are well known in the art. In one embodiment of the present invention, the Cancer Prognosticarray is a chip.

### Data Analysis

[0112] In some embodiments, one or more pattern recognition methods can be used in analyzing the expression level of target sequences. The pattern recognition method can comprise a linear combination of expression levels, or a nonlinear combination of expression levels. In some embodiments, expression measurements for RNA transcripts or combinations of RNA transcript levels are formulated into linear or non-linear models or algorithms (e.g., an ‘expression signature’) and converted into a likelihood score. This likelihood score indicates the probability that a biological sample is from a patient who may exhibit no evidence of disease, who may exhibit systemic cancer, or who may exhibit biochemical recurrence. The likelihood score can be used to distinguish these disease states. The models and/or algorithms can be provided in machine readable format, and may be used to correlate expression levels or an expression profile with a disease state, and/or to designate a treatment modality for a patient or class of patients.

[0113] Assaying the expression level for a plurality of targets may comprise the use of an algorithm or classifier. Array data can be managed, classified, and analyzed using techniques known in the art. Assaying the expression level for a plurality of targets may comprise probe set modeling and data pre-processing. Probe set modeling and data pre-processing can be derived using the Robust Multi-Array (RMA) algorithm or variants GC-RMA, JRMA, Probe Logarithmic Intensity Error (PLIER) algorithm or variant iterPLIER. Variance or intensity filters can be applied to pre-process data using the RMA algorithm, for example by removing target sequences with a standard deviation of <10 or a mean intensity of <100 intensity units of a normalized data range, respectively.

[0114] Alternatively, assaying the expression level for a plurality of targets may comprise the use of a machine learning algorithm. The machine learning algorithm may comprise a supervised learning algorithm. Examples of supervised learning algorithms may include Average One-Dependence Estimators (AODE), Artificial neural network (e.g., Backpropagation), Bayesian statistics (e.g., Naive Bayes classifier, Bayesian network, Bayesian knowledge base), Case-based reasoning, Decision trees, Inductive logic programming, Gaussian process regression, Group method of data handling (GMDH), Learning Automata, Learning Vector Quantization, Minimum message length (decision trees, decision graphs, etc.), Lazy learning, Instance-based learning Nearest Neighbor Algorithm, Analogical modeling, Probably approximately correct learning (PAC) learning, Ripple down rules, a knowledge acquisition methodology, Symbolic machine learning algorithms, Subsymbolic machine learning algorithms, Support vector machines, Random Forests, Ensembles of classifiers, Bootstrap aggregating (bagging), and Boosting. Supervised learning may comprise ordinal classification such as regression analysis and Information fuzzy networks (IFN). Alternatively, supervised learning methods may comprise statistical classification, such as AODE, Linear classifiers (e.g., Fisher's linear discriminant, Logistic regression, Naive Bayes classifier, Perceptron, and Support vector machine), quadratic classifiers, k-nearest neighbor, Boosting, Decision trees (e.g., C4.5, Random forests), Bayesian networks, and Hidden Markov models.

[0115] The machine learning algorithms may also comprise an unsupervised learning algorithm. Examples of unsupervised learning algorithms may include artificial neural network, Data clustering, Expectation-maximization algorithm, Self-organizing map, Radial basis function network, Vector Quantization, Generative topographic map, Information bottleneck method, and IBSEAD. Unsupervised learning may also comprise association rule learning algorithms such as Apriori algorithm, Eclat algorithm and FP-growth algorithm. Hierarchical clustering, such as Single-linkage clustering and Conceptual clustering, may also be used. Alternatively, unsupervised learning may comprise partitional clustering such as K-means algorithm and Fuzzy clustering.

[0116] In some instances, the machine learning algorithms comprise a reinforcement learning algorithm. Examples of reinforcement learning algorithms include, but are not limited to, temporal difference learning, Q-learning and Learning Automata. Alternatively, the machine learning algorithm may comprise Data Pre-processing.

[0117] Preferably, the machine learning algorithms may include, but are not limited to, Average One-Dependence Estimators (AODE), Fisher's linear discriminant, Logistic regression, Perceptron, Multilayer Perceptron, Artificial Neural Networks, Support vector machines, Quadratic classifiers, Boosting, Decision trees, C4.5, Bayesian networks, Hidden Markov models, High-Dimensional Discriminant Analysis, and Gaussian Mixture Models. The machine learning algorithm may comprise support vector machines, Naïve Bayes classifier, k-nearest neighbor, high-dimensional discriminant analysis, or Gaussian mixture models. In some instances, the machine learning algorithm comprises Random Forests.

### Cancer

[0118] The systems, compositions and methods disclosed herein may be used to diagnosis, monitor and/or predict the status or outcome of a cancer. Generally, a cancer is characterized by the uncontrolled growth of abnormal cells anywhere in a body. The abnormal cells may be termed cancer cells, malignant cells, or tumor cells. Cancer is not confined to humans; animals and other living organisms can get cancer.

[0119] In some instances, the cancer may be malignant. Alternatively, the cancer may be benign. The cancer may be a recurrent and/or refractory cancer. Most cancers can be classified as a carcinoma, sarcoma, leukemia, lymphoma, myeloma, or a central nervous system cancer.

[0120] The cancer may be a sarcoma. Sarcomas are cancers of the bone, cartilage, fat, muscle, blood vessels, or other connective or supportive tissue. Sarcomas include, but are not limited to, bone cancer, fibrosarcoma, chondrosarcoma, Ewing's sarcoma, malignant hemangioendothelioma, malignant schwannoma, bilateral vestibular schwannoma, osteosarcoma, soft tissue sarcomas (e.g. alveolar soft part sarcoma, angiosarcoma, cystosarcoma phylloides, dermatofibrosarcoma, desmoid tumor, epithelioid sarcoma, extraskeletal osteosarcoma, fibrosarcoma, hemangiopericytoma, hemangiosarcoma, Kaposi's sarcoma, leiomyosarcoma, liposarcoma, lymphangiosarcoma, lymphosarcoma, malignant fibrous histiocytoma, neurofibrosarcoma, rhabdomyosarcoma, and synovial sarcoma).

[0121] Alternatively, the cancer may be a carcinoma. Carcinomas are cancers that begin in the epithelial cells, which are cells that cover the surface of the body, produce hormones, and make up glands. By way of non-limiting example, carcinomas include breast cancer, pancreatic cancer, lung cancer, colon cancer, colorectal cancer, rectal cancer, kidney cancer, bladder cancer, stomach cancer, prostate cancer, liver cancer, ovarian cancer, brain cancer, vaginal cancer, vulvar cancer, uterine cancer, oral cancer, penic cancer, testicular cancer, esophageal cancer, skin cancer, cancer of the fallopian tubes, head and neck cancer, gastrointestinal stromal cancer, adenocarcinoma, cutaneous or intraocular melanoma, cancer of the anal region, cancer of the small intestine, cancer of the endocrine system, cancer of the thyroid gland, cancer of the parathyroid gland, cancer of the adrenal gland, cancer of the urethra, cancer of the renal pelvis, cancer of the ureter, cancer of the endometrium, cancer of the cervix, cancer of the pituitary gland, neoplasms of the central nervous system (CNS), primary CNS lymphoma, brain stem glioma, and spinal axis tumors. In some instances, the cancer is a skin cancer, such as a basal cell carcinoma, squamous, melanoma, nonmelanoma, or actinic (solar) keratosis. Preferably, the cancer is a prostate cancer. Alternatively, the cancer may be a thyroid cancer, bladder cancer, or pancreatic cancer.

[0122] In some instances, the cancer is a lung cancer. Lung cancer can start in the airways that branch off the trachea to supply the lungs (bronchi) or the small air sacs of the lung (the alveoli). Lung cancers include non-small cell lung carcinoma (NSCLC), small cell lung carcinoma, and mesotheliomia. Examples of NSCLC include squamous cell carcinoma, adenocarcinoma, and large cell carcinoma. The mesothelioma may be a cancerous tumor of the lining of the lung and chest cavity (pleura) or lining of the abdomen (peritoneum). The mesothelioma may be due to asbestos exposure. The cancer may be a brain cancer, such as a glioblastoma.

[0123] Alternatively, the cancer may be a central nervous system (CNS) tumor. CNS tumors may be classified as gliomas or nongliomas. The glioma may be malignant glioma, high grade glioma, diffuse intrinsic pontine glioma. Examples of gliomas include astrocytomas, oligodendrogliomas (or mixtures of oligodendroglioma and astocytoma elements), and ependymomas. Astrocytomas include, but are not limited to, low-grade astrocytomas, anaplastic astrocytomas, glioblastoma multiforme, pilocytic astrocytoma, pleomorphic xanthoastrocytoma, and subependymal giant cell astrocytoma. Oligodendrogliomas include low-grade oligodendrogliomas (or oligoastrocytomas) and anaplastic oligodendriogliomas. Nongliomas include meningiomas, pituitary adenomas, primary CNS lymphomas, and medulloblastomas. In some instances, the cancer is a meningioma.

[0124] The cancer may be a leukemia. The leukemia may be an acute lymphocytic leukemia, acute myelocytic leukemia, chronic lymphocytic leukemia, or chronic myelocytic leukemia. Additional types of leukemias include hairy cell leukemia, chronic myelomonocytic leukemia, and juvenile myelomonocytic-leukemia.

[0125] In some instances, the cancer is a lymphoma. Lymphomas are cancers of the lymphocytes and may develop from either B or T lymphocytes. The two major types of lymphoma are Hodgkin's lymphoma, previously known as Hodgkin's disease, and non-Hodgkin's lymphoma. Hodgkin's lymphoma is marked by the presence of the Reed-Sternberg cell. Non-Hodgkin's lymphomas are all lymphomas which are not Hodgkin's lymphoma. Non-Hodgkin lymphomas may be indolent lymphomas and aggressive lymphomas. Non-Hodgkin's lymphomas include, but are not limited to, diffuse large B cell lymphoma, follicular lymphoma, mucosa-associated lymphatic tissue lymphoma (MALT), small cell lymphocytic lymphoma, mantle cell lymphoma, Burkitt's lymphoma, mediastinal large B cell lymphoma, Waldenström macroglobulinemia, nodal marginal zone B cell lymphoma (NMZL), splenic marginal zone lymphoma (SMZL), extranodal marginal zone B cell lymphoma, intravascular large B cell lymphoma, primary effusion lymphoma, and lymphomatoid granulomatosis.

### Cancer Staging

[0126] Diagnosing, predicting, or monitoring a status or outcome of a cancer may comprise determining the stage of the cancer. Generally, the stage of a cancer is a description (usually numbers I to IV with IV having more progression) of the extent the cancer has spread. The stage often takes into account the size of a tumor, how deeply it has penetrated, whether it has invaded adjacent organs, how many lymph nodes it has metastasized to (if any), and whether it has spread to distant organs. Staging of cancer can be used as a predictor of survival, and cancer treatment may be determined by staging. Determining the stage of the cancer may occur before, during, or after treatment. The stage of the cancer may also be determined at the time of diagnosis.

[0127] Cancer staging can be divided into a clinical stage and a pathologic stage. Cancer staging may comprise the TNM classification. Generally, the TNM Classification of Malignant Tumours (TNM) is a cancer staging system that describes the extent of cancer in a patient's body. T may describe the size of the tumor and whether it has invaded nearby tissue, N may describe regional lymph nodes that are involved, and M may describe distant metastasis (spread of cancer from one body part to another). In the TNM (Tumor, Node, Metastasis) system, clinical stage and pathologic stage are denoted by a small “c” or “p” before the stage (e.g., cT3N1M0 or pT2N0).

[0128] Often, clinical stage and pathologic stage may differ. Clinical stage may be based on all of the available information obtained before a surgery to remove the tumor. Thus, it may include information about the tumor obtained by physical examination, radiologic examination, and endoscopy. Pathologic stage can add additional information gained by examination of the tumor microscopically by a pathologist. Pathologic staging can allow direct examination of the tumor and its spread, contrasted with clinical staging which may be limited by the fact that the information is obtained by making indirect observations at a tumor which is still in the body. The TNM staging system can be used for most forms of cancer.

[0129] Alternatively, staging may comprise Ann Arbor staging. Generally, Ann Arbor staging is the staging system for lymphomas, both in Hodgkin's lymphoma (previously called Hodgkin's disease) and Non-Hodgkin lymphoma (abbreviated NHL). The stage may depend on both the place where the malignant tissue is located (as located with biopsy, CT scanning and increasingly positron emission tomography) and on systemic symptoms due to the lymphoma (“B symptoms”: night sweats, weight loss of >10% or fevers). The principal stage may be determined by location of the tumor. Stage I may indicate that the cancer is located in a single region, usually one lymph node and the surrounding area. Stage I often may not have outward symptoms. Stage II can indicate that the cancer is located in two separate regions, an affected lymph node or organ and a second affected area, and that both affected areas are confined to one side of the diaphragm—that is, both are above the diaphragm, or both are below the diaphragm. Stage III often indicates that the cancer has spread to both sides of the diaphragm, including one organ or area near the lymph nodes or the spleen. Stage IV may indicate diffuse or disseminated involvement of one or more extralymphatic organs, including any involvement of the liver, bone marrow, or nodular involvement of the lungs.

[0130] Modifiers may also be appended to some stages. For example, the letters A, B, E, X, or S can be appended to some stages. Generally, A or B may indicate the absence of constitutional (B-type) symptoms is denoted by adding an “A” to the stage; the presence is denoted by adding a “B” to the stage. E can be used if the disease is “extranodal” (not in the lymph nodes) or has spread from lymph nodes to adjacent tissue. X is often used if the largest deposit is >10 cm large (“bulky disease”), or whether the mediastinum is wider than ⅓ of the chest on a chest X-ray. S may be used if the disease has spread to the spleen.

[0131] The nature of the staging may be expressed with CS or PS. CS may denote that the clinical stage as obtained by doctor's examinations and tests. PS may denote that the pathological stage as obtained by exploratory laparotomy (surgery performed through an abdominal incision) with splenectomy (surgical removal of the spleen).

### Therapeutic Regimens

[0132] Diagnosing, predicting, or monitoring a status or outcome of a cancer may comprise treating a cancer or preventing a cancer progression. In addition, diagnosing, predicting, or monitoring a status or outcome of a cancer may comprise identifying or predicting responders to an anti-cancer therapy. In some instances, diagnosing, predicting, or monitoring may comprise determining a therapeutic regimen. Determining a therapeutic regimen may comprise administering an anti-cancer therapy. Alternatively, determining a therapeutic regimen may comprise modifying, recommending, continuing or discontinuing an anti-cancer regimen. In some instances, if the sample expression patterns are consistent with the expression pattern for a known disease or disease outcome, the expression patterns can be used to designate one or more treatment modalities (e.g., therapeutic regimens, anti-cancer regimen). An anti-cancer regimen may comprise one or more anti-cancer therapies. Examples of anti-cancer therapies include surgery, chemotherapy, radiation therapy, immunotherapy/biological therapy, photodynamic therapy.

[0133] Surgical oncology uses surgical methods to diagnose, stage, and treat cancer, and to relieve certain cancer-related symptoms. Surgery may be used to remove the tumor (e.g., excisions, resections, debulking surgery), reconstruct a part of the body (e.g., restorative surgery), and/or to relieve symptoms such as pain (e.g., palliative surgery). Surgery may also include cryosurgery. Cryosurgery (also called cryotherapy) may use extreme cold produced by liquid nitrogen (or argon gas) to destroy abnormal tissue. Cryosurgery can be used to treat external tumors, such as those on the skin. For external tumors, liquid nitrogen can be applied directly to the cancer cells with a cotton swab or spraying device. Cryosurgery may also be used to treat tumors inside the body (internal tumors and tumors in the bone). For internal tumors, liquid nitrogen or argon gas may be circulated through a hollow instrument called a cryoprobe, which is placed in contact with the tumor. An ultrasound or MRI may be used to guide the cryoprobe and monitor the freezing of the cells, thus limiting damage to nearby healthy tissue. A ball of ice crystals may form around the probe, freezing nearby cells. Sometimes more than one probe is used to deliver the liquid nitrogen to various parts of the tumor. The probes may be put into the tumor during surgery or through the skin (percutaneously). After cryosurgery, the frozen tissue thaws and may be naturally absorbed by the body (for internal tumors), or may dissolve and form a scab (for external tumors).

[0134] Chemotherapeutic agents may also be used for the treatment of cancer. Examples of chemotherapeutic agents include alkylating agents, anti-metabolites, plant alkaloids and terpenoids, Vinca alkaloids, podophyllotoxin, taxanes, topoisomerase inhibitors, and cytotoxic antibiotics. Cisplatin, carboplatin, and oxaliplatin are examples of alkylating agents. Other alkylating agents include mechlorethamine, cyclophosphamide, chlorambucil, ifosfamide. Alkylating agents may impair cell function by forming covalent bonds with the amino, carboxyl, sulfhydryl, and phosphate groups in biologically important molecules. Alternatively, alkylating agents may chemically modify a cell's DNA.

[0135] Anti-metabolites are another example of chemotherapeutic agents. Anti-metabolites may masquerade as purines or pyrimidines and may prevent purines and pyrimidines from becoming incorporated in to DNA during the “S” phase (of the cell cycle), thereby stopping normal development and division. Antimetabolites may also affect RNA synthesis. Examples of metabolites include azathioprine and mercaptopurine.

[0136] Alkaloids may be derived from plants and block cell division may also be used for the treatment of cancer. Alkyloids may prevent microtubule function. Examples of alkaloids are Vinca alkaloids and taxanes. Vinca alkaloids may bind to specific sites on tubulin and inhibit the assembly of tubulin into microtubules (M phase of the cell cycle). The Vinca alkaloids may be derived from the Madagascar periwinkle, Catharanthus roseus (formerly known as Vinca rosea). Examples of Vinca alkaloids include, but are not limited to, vincristine, vinblastine, vinorelbine, or vindesine. Taxanes are diterpenes produced by the plants of the genus Taxus (yews). Taxanes may be derived from natural sources or synthesized artificially. Taxanes include paclitaxel (Taxol) and docetaxel (Taxotere). Taxanes may disrupt microtubule function. Microtubules are essential to cell division, and taxanes may stabilize GDP-bound tubulin in the microtubule, thereby inhibiting the process of cell division. Thus, in essence, taxanes may be mitotic inhibitors. Taxanes may also be radiosensitizing and often contain numerous chiral centers.

[0137] Alternative chemotherapeutic agents include podophyllotoxin. Podophyllotoxin is a plant-derived compound that may help with digestion and may be used to produce cytostatic drugs such as etoposide and teniposide. They may prevent the cell from entering the G1 phase (the start of DNA replication) and the replication of DNA (the S phase).

[0138] Topoisomerases are essential enzymes that maintain the topology of DNA. Inhibition of type I or type II topoisomerases may interfere with both transcription and replication of DNA by upsetting proper DNA supercoiling. Some chemotherapeutic agents may inhibit topoisomerases. For example, some type I topoisomerase inhibitors include camptothecins: irinotecan and topotecan. Examples of type II inhibitors include amsacrine, etoposide, etoposide phosphate, and teniposide.

[0139] Another example of chemotherapeutic agents is cytotoxic antibiotics. Cytotoxic antibiotics are a group of antibiotics that are used for the treatment of cancer because they may interfere with DNA replication and/or protein synthesis. Cytotoxic antiobiotics include, but are not limited to, actinomycin, anthracyclines, doxorubicin, daunorubicin, valrubicin, idarubicin, epirubicin, bleomycin, plicamycin, and mitomycin.

[0140] In some instances, the anti-cancer treatment may comprise radiation therapy. Radiation can come from a machine outside the body (external-beam radiation therapy) or from radioactive material placed in the body near cancer cells (internal radiation therapy, more commonly called brachytherapy). Systemic radiation therapy uses a radioactive substance, given by mouth or into a vein that travels in the blood to tissues throughout the body.

[0141] External-beam radiation therapy may be delivered in the form of photon beams (either x-rays or gamma rays). A photon is the basic unit of light and other forms of electromagnetic radiation. An example of external-beam radiation therapy is called 3-dimensional conformal radiation therapy (3D-CRT). 3D-CRT may use computer software and advanced treatment machines to deliver radiation to very precisely shaped target areas. Many other methods of external-beam radiation therapy are currently being tested and used in cancer treatment. These methods include, but are not limited to, intensity-modulated radiation therapy (IMRT), image-guided radiation therapy (IGRT), Stereotactic radiosurgery (SRS), Stereotactic body radiation therapy (SBRT), and proton therapy.

[0142] Intensity-modulated radiation therapy (IMRT) is an example of external-beam radiation and may use hundreds of tiny radiation beam-shaping devices, called collimators, to deliver a single dose of radiation. The collimators can be stationary or can move during treatment, allowing the intensity of the radiation beams to change during treatment sessions. This kind of dose modulation allows different areas of a tumor or nearby tissues to receive different doses of radiation. IMRT is planned in reverse (called inverse treatment planning). In inverse treatment planning, the radiation doses to different areas of the tumor and surrounding tissue are planned in advance, and then a high-powered computer program calculates the required number of beams and angles of the radiation treatment. In contrast, during traditional (forward) treatment planning, the number and angles of the radiation beams are chosen in advance and computers calculate how much dose may be delivered from each of the planned beams. The goal of IMRT is to increase the radiation dose to the areas that need it and reduce radiation exposure to specific sensitive areas of surrounding normal tissue.

[0143] Another example of external-beam radiation is image-guided radiation therapy (IGRT). In IGRT, repeated imaging scans (CT, MRI, or PET) may be performed during treatment. These imaging scans may be processed by computers to identify changes in a tumor's size and location due to treatment and to allow the position of the patient or the planned radiation dose to be adjusted during treatment as needed. Repeated imaging can increase the accuracy of radiation treatment and may allow reductions in the planned volume of tissue to be treated, thereby decreasing the total radiation dose to normal tissue.

[0144] Tomotherapy is a type of image-guided IMRT. A tomotherapy machine is a hybrid between a CT imaging scanner and an external-beam radiation therapy machine. The part of the tomotherapy machine that delivers radiation for both imaging and treatment can rotate completely around the patient in the same manner as a normal CT scanner. Tomotherapy machines can capture CT images of the patient's tumor immediately before treatment sessions, to allow for very precise tumor targeting and sparing of normal tissue.

[0145] Stereotactic radiosurgery (SRS) can deliver one or more high doses of radiation to a small tumor. SRS uses extremely accurate image-guided tumor targeting and patient positioning. Therefore, a high dose of radiation can be given without excess damage to normal tissue. SRS can be used to treat small tumors with well-defined edges. It is most commonly used in the treatment of brain or spinal tumors and brain metastases from other cancer types. For the treatment of some brain metastases, patients may receive radiation therapy to the entire brain (called whole-brain radiation therapy) in addition to SRS. SRS requires the use of a head frame or other device to immobilize the patient during treatment to ensure that the high dose of radiation is delivered accurately.

[0146] Stereotactic body radiation therapy (SBRT) delivers radiation therapy in fewer sessions, using smaller radiation fields and higher doses than 3D-CRT in most cases. SBRT may treat tumors that lie outside the brain and spinal cord. Because these tumors are more likely to move with the normal motion of the body, and therefore cannot be targeted as accurately as tumors within the brain or spine, SBRT is usually given in more than one dose. SBRT can be used to treat small, isolated tumors, including cancers in the lung and liver. SBRT systems may be known by their brand names, such as the CyberKnife®.

[0147] In proton therapy, external-beam radiation therapy may be delivered by proton. Protons are a type of charged particle. Proton beams differ from photon beams mainly in the way they deposit energy in living tissue. Whereas photons deposit energy in small packets all along their path through tissue, protons deposit much of their energy at the end of their path (called the Bragg peak) and deposit less energy along the way. Use of protons may reduce the exposure of normal tissue to radiation, possibly allowing the delivery of higher doses of radiation to a tumor.

[0148] Other charged particle beams such as electron beams may be used to irradiate superficial tumors, such as skin cancer or tumors near the surface of the body, but they cannot travel very far through tissue.

[0149] Internal radiation therapy (brachytherapy) is radiation delivered from radiation sources (radioactive materials) placed inside or on the body. Several brachytherapy techniques are used in cancer treatment. Interstitial brachytherapy may use a radiation source placed within tumor tissue, such as within a prostate tumor. Intracavitary brachytherapy may use a source placed within a surgical cavity or a body cavity, such as the chest cavity, near a tumor. Episcleral brachytherapy, which may be used to treat melanoma inside the eye, may use a source that is attached to the eye. In brachytherapy, radioactive isotopes can be sealed in tiny pellets or “seeds.” These seeds may be placed in patients using delivery devices, such as needles, catheters, or some other type of carrier. As the isotopes decay naturally, they give off radiation that may damage nearby cancer cells. Brachytherapy may be able to deliver higher doses of radiation to some cancers than external-beam radiation therapy while causing less damage to normal tissue.

[0150] Brachytherapy can be given as a low-dose-rate or a high-dose-rate treatment. In low-dose-rate treatment, cancer cells receive continuous low-dose radiation from the source over a period of several days. In high-dose-rate treatment, a robotic machine attached to delivery tubes placed inside the body may guide one or more radioactive sources into or near a tumor, and then removes the sources at the end of each treatment session. High-dose-rate treatment can be given in one or more treatment sessions. An example of a high-dose-rate treatment is the MammoSite® system. Bracytherapy may be used to treat patients with breast cancer who have undergone breast-conserving surgery.

[0151] The placement of brachytherapy sources can be temporary or permanent. For permanent brachytherapy, the sources may be surgically sealed within the body and left there, even after all of the radiation has been given off. In some instances, the remaining material (in which the radioactive isotopes were sealed) does not cause any discomfort or harm to the patient. Permanent brachytherapy is a type of low-dose-rate brachytherapy. For temporary brachytherapy, tubes (catheters) or other carriers are used to deliver the radiation sources, and both the carriers and the radiation sources are removed after treatment. Temporary brachytherapy can be either low-dose-rate or high-dose-rate treatment. Brachytherapy may be used alone or in addition to external-beam radiation therapy to provide a “boost” of radiation to a tumor while sparing surrounding normal tissue.

[0152] In systemic radiation therapy, a patient may swallow or receive an injection of a radioactive substance, such as radioactive iodine or a radioactive substance bound to a monoclonal antibody. Radioactive iodine (131I) is a type of systemic radiation therapy commonly used to help treat cancer, such as thyroid cancer. Thyroid cells naturally take up radioactive iodine. For systemic radiation therapy for some other types of cancer, a monoclonal antibody may help target the radioactive substance to the right place. The antibody joined to the radioactive substance travels through the blood, locating and killing tumor cells. For example, the drug ibritumomab tiuxetan (Zevalin®) may be used for the treatment of certain types of B-cell non-Hodgkin lymphoma (NHL). The antibody part of this drug recognizes and binds to a protein found on the surface of B lymphocytes. The combination drug regimen of tositumomab and iodine 113I tositumomab (Bexxar®) may be used for the treatment of certain types of cancer, such as NHL. In this regimen, nonradioactive tositumomab antibodies may be given to patients first, followed by treatment with tositumomab antibodies that have 131I attached. Tositumomab may recognize and bind to the same protein on B lymphocytes as ibritumomab. The nonradioactive form of the antibody may help protect normal B lymphocytes from being damaged by radiation from 131I.

[0153] Some systemic radiation therapy drugs relieve pain from cancer that has spread to the bone (bone metastases). This is a type of palliative radiation therapy. The radioactive drugs samarium-153-lexidronam (Quadramet®) and strontium-89 chloride (Metastron®) are examples of radiopharmaceuticals may be used to treat pain from bone metastases.

[0154] Biological therapy (sometimes called immunotherapy, biotherapy, or biological response modifier (BRM) therapy) uses the body's immune system, either directly or indirectly, to fight cancer or to lessen the side effects that may be caused by some cancer treatments. Biological therapies include interferons, interleukins, colony-stimulating factors, monoclonal antibodies, vaccines, gene therapy, and nonspecific immunomodulating agents.

[0155] Interferons (IFNs) are types of cytokines that occur naturally in the body. Interferon alpha, interferon beta, and interferon gamma are examples of interferons that may be used in cancer treatment.

[0156] Like interferons, interleukins (ILs) are cytokines that occur naturally in the body and can be made in the laboratory. Many interleukins have been identified for the treatment of cancer. For example, interleukin-2 (IL-2 or aldesleukin), interleukin 7, and interleukin 12 have may be used as an anti-cancer treatment. IL-2 may stimulate the growth and activity of many immune cells, such as lymphocytes, that can destroy cancer cells. Interleukins may be used to treat a number of cancers, including leukemia, lymphoma, and brain, colorectal, ovarian, breast, kidney and prostate cancers.

[0157] Colony-stimulating factors (CSFs) (sometimes called hematopoietic growth factors) may also be used for the treatment of cancer. Some examples of CSFs include, but are not limited to, G-CSF (filgrastim) and GM-CSF (sargramostim). CSFs may promote the division of bone marrow stem cells and their development into white blood cells, platelets, and red blood cells. Bone marrow is critical to the body's immune system because it is the source of all blood cells. Because anticancer drugs can damage the body's ability to make white blood cells, red blood cells, and platelets, stimulation of the immune system by CSFs may benefit patients undergoing other anti-cancer treatment, thus CSFs may be combined with other anti-cancer therapies, such as chemotherapy. CSFs may be used to treat a large variety of cancers, including lymphoma, leukemia, multiple myeloma, melanoma, and cancers of the brain, lung, esophagus, breast, uterus, ovary, prostate, kidney, colon, and rectum.

[0158] Another type of biological therapy includes monoclonal antibodies (MOABs or MoABs). These antibodies may be produced by a single type of cell and may be specific for a particular antigen. To create MOABs, a human cancer cells may be injected into mice. In response, the mouse immune system can make antibodies against these cancer cells. The mouse plasma cells that produce antibodies may be isolated and fused with laboratory-grown cells to create “hybrid” cells called hybridomas. Hybridomas can indefinitely produce large quantities of these pure antibodies, or MOABs. MOABs may be used in cancer treatment in a number of ways. For instance, MOABs that react with specific types of cancer may enhance a patient's immune response to the cancer. MOABs can be programmed to act against cell growth factors, thus interfering with the growth of cancer cells.

[0159] MOABs may be linked to other anti-cancer therapies such as chemotherapeutics, radioisotopes (radioactive substances), other biological therapies, or other toxins. When the antibodies latch onto cancer cells, they deliver these anti-cancer therapies directly to the tumor, helping to destroy it. MOABs carrying radioisotopes may also prove useful in diagnosing certain cancers, such as colorectal, ovarian, and prostate.

[0160] Rituxan® (rituximab) and Herceptin® (trastuzumab) are examples of MOABs that may be used as a biological therapy. Rituxan may be used for the treatment of non-Hodgkin lymphoma. Herceptin can be used to treat metastatic breast cancer in patients with tumors that produce excess amounts of a protein called HER2. Alternatively, MOABs may be used to treat lymphoma, leukemia, melanoma, and cancers of the brain, breast, lung, kidney, colon, rectum, ovary, prostate, and other areas.

[0161] Cancer vaccines are another form of biological therapy. Cancer vaccines may be designed to encourage the patient's immune system to recognize cancer cells. Cancer vaccines may be designed to treat existing cancers (therapeutic vaccines) or to prevent the development of cancer (prophylactic vaccines). Therapeutic vaccines may be injected in a person after cancer is diagnosed. These vaccines may stop the growth of existing tumors, prevent cancer from recurring, or eliminate cancer cells not killed by prior treatments. Cancer vaccines given when the tumor is small may be able to eradicate the cancer. On the other hand, prophylactic vaccines are given to healthy individuals before cancer develops. These vaccines are designed to stimulate the immune system to attack viruses that can cause cancer. By targeting these cancer-causing viruses, development of certain cancers may be prevented. For example, cervarix and gardasil are vaccines to treat human papilloma virus and may prevent cervical cancer. Therapeutic vaccines may be used to treat melanoma, lymphoma, leukemia, and cancers of the brain, breast, lung, kidney, ovary, prostate, pancreas, colon, and rectum. Cancer vaccines can be used in combination with other anti-cancer therapies.

[0162] Gene therapy is another example of a biological therapy. Gene therapy may involve introducing genetic material into a person's cells to fight disease. Gene therapy methods may improve a patient's immune response to cancer. For example, a gene may be inserted into an immune cell to enhance its ability to recognize and attack cancer cells. In another approach, cancer cells may be injected with genes that cause the cancer cells to produce cytokines and stimulate the immune system.

[0163] In some instances, biological therapy includes nonspecific immunomodulating agents. Nonspecific immunomodulating agents are substances that stimulate or indirectly augment the immune system. Often, these agents target key immune system cells and may cause secondary responses such as increased production of cytokines and immunoglobulins. Two nonspecific immunomodulating agents used in cancer treatment are bacillus Calmette-Guerin (BCG) and levamisole. BCG may be used in the treatment of superficial bladder cancer following surgery. BCG may work by stimulating an inflammatory, and possibly an immune, response. A solution of BCG may be instilled in the bladder. Levamisole is sometimes used along with fluorouracil (5-FU) chemotherapy in the treatment of stage III (Dukes' C) colon cancer following surgery. Levamisole may act to restore depressed immune function.

[0164] Photodynamic therapy (PDT) is an anti-cancer treatment that may use a drug, called a photosensitizer or photosensitizing agent, and a particular type of light. When photosensitizers are exposed to a specific wavelength of light, they may produce a form of oxygen that kills nearby cells. A photosensitizer may be activated by light of a specific wavelength. This wavelength determines how far the light can travel into the body. Thus, photosensitizers and wavelengths of light may be used to treat different areas of the body with PDT.

[0165] In the first step of PDT for cancer treatment, a photosensitizing agent may be injected into the bloodstream. The agent may be absorbed by cells all over the body but may stay in cancer cells longer than it does in normal cells. Approximately 24 to 72 hours after injection, when most of the agent has left normal cells but remains in cancer cells, the tumor can be exposed to light. The photosensitizer in the tumor can absorb the light and produces an active form of oxygen that destroys nearby cancer cells. In addition to directly killing cancer cells, PDT may shrink or destroy tumors in two other ways. The photosensitizer can damage blood vessels in the tumor, thereby preventing the cancer from receiving necessary nutrients. PDT may also activate the immune system to attack the tumor cells.

[0166] The light used for PDT can come from a laser or other sources. Laser light can be directed through fiber optic cables (thin fibers that transmit light) to deliver light to areas inside the body. For example, a fiber optic cable can be inserted through an endoscope (a thin, lighted tube used to look at tissues inside the body) into the lungs or esophagus to treat cancer in these organs. Other light sources include light-emitting diodes (LEDs), which may be used for surface tumors, such as skin cancer. PDT is usually performed as an outpatient procedure. PDT may also be repeated and may be used with other therapies, such as surgery, radiation, or chemotherapy.

[0167] Extracorporeal photopheresis (ECP) is a type of PDT in which a machine may be used to collect the patient's blood cells. The patient's blood cells may be treated outside the body with a photosensitizing agent, exposed to light, and then returned to the patient. ECP may be used to help lessen the severity of skin symptoms of cutaneous T-cell lymphoma that has not responded to other therapies. ECP may be used to treat other blood cancers, and may also help reduce rejection after transplants.

[0168] Additionally, photosensitizing agent, such as porfimer sodium or Photofrin®, may be used in PDT to treat or relieve the symptoms of esophageal cancer and non-small cell lung cancer. Porfimer sodium may relieve symptoms of esophageal cancer when the cancer obstructs the esophagus or when the cancer cannot be satisfactorily treated with laser therapy alone. Porfimer sodium may be used to treat non-small cell lung cancer in patients for whom the usual treatments are not appropriate, and to relieve symptoms in patients with non-small cell lung cancer that obstructs the airways. Porfimer sodium may also be used for the treatment of precancerous lesions in patients with Barrett esophagus, a condition that can lead to esophageal cancer.

[0169] Laser therapy may use high-intensity light to treat cancer and other illnesses. Lasers can be used to shrink or destroy tumors or precancerous growths. Lasers are most commonly used to treat superficial cancers (cancers on the surface of the body or the lining of internal organs) such as basal cell skin cancer and the very early stages of some cancers, such as cervical, penile, vaginal, vulvar, and non-small cell lung cancer.

[0170] Lasers may also be used to relieve certain symptoms of cancer, such as bleeding or obstruction. For example, lasers can be used to shrink or destroy a tumor that is blocking a patient's trachea (windpipe) or esophagus. Lasers also can be used to remove colon polyps or tumors that are blocking the colon or stomach.

[0171] Laser therapy is often given through a flexible endoscope (a thin, lighted tube used to look at tissues inside the body). The endoscope is fitted with optical fibers (thin fibers that transmit light). It is inserted through an opening in the body, such as the mouth, nose, anus, or vagina. Laser light is then precisely aimed to cut or destroy a tumor.

[0172] Laser-induced interstitial thermotherapy (LITT), or interstitial laser photocoagulation, also uses lasers to treat some cancers. LITT is similar to a cancer treatment called hyperthermia, which uses heat to shrink tumors by damaging or killing cancer cells. During LITT, an optical fiber is inserted into a tumor. Laser light at the tip of the fiber raises the temperature of the tumor cells and damages or destroys them. LITT is sometimes used to shrink tumors in the liver.

[0173] Laser therapy can be used alone, but most often it is combined with other treatments, such as surgery, chemotherapy, or radiation therapy. In addition, lasers can seal nerve endings to reduce pain after surgery and seal lymph vessels to reduce swelling and limit the spread of tumor cells.

[0174] Lasers used to treat cancer may include carbon dioxide (CO2) lasers, argon lasers, and neodymium:yttrium-aluminum-garnet (Nd:YAG) lasers. Each of these can shrink or destroy tumors and can be used with endoscopes. CO2 and argon lasers can cut the skin's surface without going into deeper layers. Thus, they can be used to remove superficial cancers, such as skin cancer. In contrast, the Nd:YAG laser is more commonly applied through an endoscope to treat internal organs, such as the uterus, esophagus, and colon. Nd:YAG laser light can also travel through optical fibers into specific areas of the body during LITT. Argon lasers are often used to activate the drugs used in PDT.

[0175] For patients with high test scores consistent with systemic disease outcome after prostatectomy, additional treatment modalities such as adjuvant chemotherapy (e.g., docetaxel, mitoxantrone and prednisone), systemic radiation therapy (e.g., samarium or strontium) and/or anti-androgen therapy (e.g., surgical castration, finasteride, dutasteride) can be designated. Such patients would likely be treated immediately with anti-androgen therapy alone or in combination with radiation therapy in order to eliminate presumed micro-metastatic disease, which cannot be detected clinically but can be revealed by the target sequence expression signature.

[0176] Such patients can also be more closely monitored for signs of disease progression. For patients with intermediate test scores consistent with biochemical recurrence only (BCR-only or elevated PSA that does not rapidly become manifested as systemic disease only localized adjuvant therapy (e.g., radiation therapy of the prostate bed) or short course of anti-androgen therapy would likely be administered. For patients with low scores or scores consistent with no evidence of disease (NED) adjuvant therapy would not likely be recommended by their physicians in order to avoid treatment-related side effects such as metabolic syndrome (e.g., hypertension, diabetes and/or weight gain), osteoporosis, proctitis, incontinence or impotence. Patients with samples consistent with NED could be designated for watchful waiting, or for no treatment. Patients with test scores that do not correlate with systemic disease but who have successive PSA increases could be designated for watchful waiting, increased monitoring, or lower dose or shorter duration anti-androgen therapy.

[0177] Target sequences can be grouped so that information obtained about the set of target sequences in the group can be used to make or assist in making a clinically relevant judgment such as a diagnosis, prognosis, or treatment choice.

[0178] A patient report is also provided comprising a representation of measured expression levels of a plurality of target sequences in a biological sample from the patient, wherein the representation comprises expression levels of target sequences corresponding to any one, two, three, four, five, six, eight, ten, twenty, thirty, forty, fifty or more of the target sequences corresponding to a target selected from Table 1 or SEQ ID NOs: 1-1815, the subsets described herein, or a combination thereof. In some embodiments, the representation of the measured expression level(s) may take the form of a linear or nonlinear combination of expression levels of the target sequences of interest. The patient report may be provided in a machine (e.g., a computer) readable format and/or in a hard (paper) copy. The report can also include standard measurements of expression levels of said plurality of target sequences from one or more sets of patients with known disease status and/or outcome. The report can be used to inform the patient and/or treating physician of the expression levels of the expressed target sequences, the likely medical diagnosis and/or implications, and optionally may recommend a treatment modality for the patient.

[0179] Also provided are representations of the gene expression profiles useful for treating, diagnosing, prognosticating, and otherwise assessing disease. In some embodiments, these profile representations are reduced to a medium that can be automatically read by a machine such as computer readable media (magnetic, optical, and the like). The articles can also include instructions for assessing the gene expression profiles in such media. For example, the articles may comprise a readable storage form having computer instructions for comparing gene expression profiles of the portfolios of genes described above. The articles may also have gene expression profiles digitally recorded therein so that they may be compared with gene expression data from patient samples. Alternatively, the profiles can be recorded in different representational format. A graphical recordation is one such format. Clustering algorithms can assist in the visualization of such data.

### Cancer Aggressiveness Prediction

[0180] In some embodiments, the methods and genomic classifiers of the present invention are useful for predicting aggressive prostate cancer. In some embodiments, the methods and genomic classifiers of the present invention are used to predict patient outcomes such as biochemical recurrence (BCR), metastasis (MET) and prostate cancer death (PCSM) after radical prostatectomy. In other embodiments, the methods and genomic classifiers of the present invention are used to predict patient outcomes such as distant metastasis-free survival (DMFS), biochemical recurrence-free survival (bRFS), prostate cancer specific survival (PCSS), and overall survival (OS).

### Metastasis Prediction

[0181] In some embodiments, the methods and genomic classifiers of the present invention are useful for predicting prostate cancer metastasis following radical prostatectomy. In other embodiments, the methods and genomic classifiers of the present invention are useful for determining a course of treatment following radical prostatectomy.

[0182] The following examples are provided to further illustrate the advantages and features of the present invention, but are not intended to limit the scope of the invention. While they are typical of those that might be used, other procedures, methodologies, or techniques known to those skilled in the art may alternatively be used.

### EXAMPLES

### Example 1: A Genomic Classifier to Predict Aggressive Prostate Cancer in Humans

[0183] A genomic classifier to predict aggressive prostate cancer in human subjects was developed as follows. To build, validate and evaluate the novel genomic model, a total of 9,901 genome-wide expression profiles from assays of biopsy and radical prostatectomy (RP) tumor tissue specimens. This included genome-wide expression, treatment and outcomes data from 1,261 prostate cancer patients treated with RP in seven retrospective institutional cohorts. A second set of de-identified, and anonymized prospective RP cases with basic demographic and pathological data from clinical use of the Decipher RP test (n=6,739) was also part of this cohort. Finally, the third set of patient data included 1,694 prospective biopsy expression profiles with basic clinical data and 253 retrospective biopsy profiles with detailed clinical data at biopsy and pathological data at RP.

[0184] The retrospective RP data from 1,261 patients, as well as a randomly selected sample of 2,041 patients, which represents 30% of the prospectively collected RP samples, were used as a development cohort for the novel genomic model. The remaining 70% (n=4,698) of the prospectively collected RP samples, as well as 1,694 prospectively collected biopsy samples and 253 retrospectively collected biopsy samples (with known pathological variables at RP) were used as validation cohorts for the novel genomic model.

[0185] Affymetrix Human Exon 1.0 ST microarray (Affymetrix, Santa Clara, CA) data were obtained from the formalin-fixed paraffin-embedded biopsy and RP specimens described above. Microarray processing was performed in a CLIA-certified clinical operations laboratory (GenomeDx Biosciences, Inc, San Diego, CA). Microarrays were normalized using Single Channel Array Normalization. (Piccolo et al. Genomics. 2012; 100(6):337-344.)

[0186] The first step in the model development was to assign a metastasis score to a large prospective cohort of 1,539 patients into high metastatic risk and low metastatic risk using the validated Decipher signature (DV1). Next, these patients were grouped into high aggressiveness category (high DV1 and GS>8) and low aggressiveness category (low DV1 and GS>7). To select gene features for the novel genomics classifier (DV2), we processed a retrospective cohort of 545 patients treated with RP, who had long-term follow-up and clinical recurrence outcomes (metastasis vs. no metastasis) with an additional 400 prospective patients, for whom the outcome of interest was low aggressive disease (LAD) vs high aggressive disease (HAD). We selected genes that were associated with HAD, and/or metastasis (FDR adjusted p-value 0.05). From this process, a total of 172 genes were selected to train the DV2 model. Next, we trained DV2 on a total of 1,539 prospective samples (HAD: 269, LAD:1,270) using a GLMNET model with Elasticnet mixing parameters 0.5 and the 172 filtered genes. Model optimization and performance evaluation on training data was determined using 10-fold cross validation. DV2 generates scores from between 0 and 1, where patients with higher score will have higher probability of metastasis.

### Statistical Analysis

[0187] All statistical analyses were conducted using R version 3.3.2 and all tests of significance were two-sided at the 0.05 level. The primary endpoint of the analysis is high stage disease, which is defined as pathological stage T3b or above or node positive at RP. The secondary endpoint is high grade disease, which is defined as pathological Gleason Grade Group 4 to 5. Analysis were performed in both prospective and retrospective biopsy sets. Age, pretreatment PSA (log 2 transformed) and percent positive cores were modeled as continuous variables, and clinical stage, clinical Gleason Scores were treated as categorical variables. NCCN risk category was calculated using clinical stage, clinical Gleason and pretreatment PSA. The association between the genomic models and clinical pathological features were evacuated using Spearman's rank correlation. The performance of clinical model, DV1 and DV2 were compared using area under ROC curves, univariable and multivariable logistic regression models. Firth's penalized likelihood method was used in the retrospective biopsy set to adjust for rare event.

### Results

[0188] In the retrospective RP data set (n=545) 812 genes were differentially expressed between tumors of patients with metastasis compared to those without after a median follow up 17 years. We used about 30% (n=2,041) of the prospective RP data set to select genes and train the DV2 model. Using the composite endpoint, we identified 1,584 differentially expressed genes comparing tumors with high and low genomic-pathologic scores. We identified 172 genes from the intersection of these two selection steps. A subset of 1,539 prospective RP patient data were then used to train the final DV2 model, again using the genomic-pathologic endpoint in a generalized linear model (GLMnet). After training the GLMnet, the final DV2 model was comprised of 60 genes with non-zero weights (Table 1). In the training data set, DV2 achieved a 10-fold cross-validated AUC of 0.92 to predict high tumor genomic-pathologic score.

TABLE 1
Gene Targets

| | | | | | |
|---|---|---|---|---|---|
| AC020571.3 | FTH1P2 | LIPH | OR51A6P | RP11-159H20.3 | SMC4 |
| ANO7 | FTH1P8 | LPAR3 | PABPC1 | RP11-755O11.2 | TIPARP |
| ARL6IP1P2 | GLB1L2 | LPGAT1 | PART1 | RP11-770G2.5 | TMEM100 |
| ASPN | GLB1L3 | MIR4435-1HG | PCAT14 | RP11-923I11.3 | TNFRSF19 |
| AZGP1 | GLYATL1P3 | MKI67 | PGM5P4-AS1 | RP13-753N3.3 | TOP2A |
| AZGP1P1 | GMNN | MLLT11 | PICK1 | RPL31P57 | TPX2 |
| DEGS1 | HIF3A | MYBPC1 | PTTG1 | SCIN | TRIQK |
| ERO1LB | INHBA | NADK2 | R3HDM1 | SESN3 | VBP1 |
| FBXL8 | KIAA1210 | NR4A1 | RNA5SP121 | SETP14 | WFDC2 |
| FMO5 | KRT15 | NUSAP1 | RP11-121G22.3 | SLC22A3 | XPO6 |

Correlation of Model Scores with Clinical Features of Prostate Cancer Tumors Sampled at Diagnosis and after RP

[0189] We first evaluated DV1 and DV2 in a prospective data set of 1,694 tumor expression profiles obtained from Decipher biopsy testing, which is representative of the spectrum of non-metastatic, localized disease observed in contemporary practice (Table 2). As depicted in FIGS. 1A and 1B, both models positively correlated with biopsy Grade Groups (p<0.001) and NCCN risk categories (p<0.001) as well as diagnostic PSA, clinical stage and percentage of positive cores (p<0.001) (FIGS. 2A-C). Similarly, in the remaining prospective RP data set not used for DV2 training (n=6,739) model scores were positively correlated (Spearman's rank correlation, p<0.001) with pathological tumor grade and stage (FIG. 3A-B). Expectedly, the model scores in prospective RP and biopsy tumor specimens showed highly concordant distributions across the tumor Grade Groups (FIG. 4).

TABLE 2
Prospective cohort for testing DV1 and DV2.

| Variables | Prospective Biopsy | |
|---|---|---|
| Total | 1694 | |
| Age | | |
| Median (Q1, Q3) | 67 | (61, 72) |
| PSA | | |
| ≤5 | 451 | (26.6) |
| 5-10 | 663 | (39.1) |
| 10-20 | 219 | (12.9) |
| >20 | 93 | (5.5) |
| Unknown | 268 | (15.8) |
| Clinical Gleason Score | | |
| ≤3 + 3 | 659 | (38.9) |
| 3 + 4 | 569 | (33.6) |
| 4 + 3 | 232 | (13.7) |
| 8 | 141 | (8.3) |
| 9-10 | 93 | (5.5) |
| Unknown | | |
| Clinical stage | | |
| ≤T1c | 898 | (53.0) |
| T2a | 123 | (7.3) |
| T2b/c | 121 | (7.1) |
| ≥T3 | 18 | (1.1) |
| Unknown | 534 | (31.5) |
| NCCN risk categories | | |
| Low | 340 | (20.1) |
| Intermediate | 856 | (50.5) |
| High | 288 | (17.0) |
| Unknown | 210 | (12.4) |
| Pathological Gleason Score | | |
| ≤3 + 3 | | |
| 3 + 4 | | |
| 4 + 3 | | |
| 8 | | |
| 9-10 | | |
| Unknown | 1694 | (100.0) |
| Pathological stage | | |
| pT2 | | |
| pT3a | | |
| pT3b | | |
| pT4 | | |
| Unknown | 1694 | (100.0) |
| Surgical Margin | | |
| Negative | | |
| Positive | | |
| Unknown | 1694 | (100.0) |
| Extracapsular Extension | | |
| Absent | | |
| Present | | |
| Unknown | 1694 | (100.0) |
| Seminal Vesicle Invasion | | |
| Absent | | |
| Present | | |
| Unknown | 1694 | (100.0) |
| Lymph Node Involvement | | |
| Absent | | |
| Present | | |
| Unknown | 1694 | (100.0) |
| Adverse Pathology (pT3b₊/LNI₊) | | |
| 0 | | |
| 1 | | |
| Unknown | 1694 | (100.0) |

### Genomic Classifier Scores Predict Presence of Higher-Grade Disease Upon Pathological Re-Review

[0190] In the prospective cohort, independent pathological review was performed in order to select tumor tissue among the prostate needle biopsy cores submitted for the Decipher genome-wide expression assay. We evaluated the distribution of DV1 and DV2 scores among cases where tumor grading changed (FIG. 5). This analysis showed both genomic models were not only positively correlated (p<0.001) with independent histological review, but both DV1 and DV2 assigned higher scores to patients who were upgraded and lower scores to those were downgraded upon re-review

[0191] The clinical impact was particularly pronounced in tumors from patients submitted for testing with an initial diagnosis of Grade Group 1 (Gleason 3+3) disease and available independent histological review. Of this subset (n=534), upgrading was observed in 157 (29%) of cases, including 13 that were upgraded to primary pattern 4 or higher (Grade Group 3-5). When these cases were assessed by DV1 and DV2, we found the DV1 model showed median scores of 0.39, 0.46, 0.59 in GG1, GG2, and GG3-5 patients, respectively (FIG. 6A). The median scores for the DV2 model in GG1, GG2, and GG3-5 patients were 0.05, 0.08 and 0.25 (FIG. 6B). The corresponding AUCs for predicting any upgrade among the Grade Group 1 tumors were 0.61 and 0.63 for DV1 and DV2; compared to 0.59, 0.55 and 0.58 for age, PSA and percent positive cores, respectively (FIG. 6C). In MVA analyses adjusting for clinical risk factors for up-grading, each 0.1 change in DV1 and DV2 scores were associated with 29% and 30% increased odds of up-grading on re-review (Table 3). Similarly, among patients initially diagnosed with Gleason 3+4 disease, both models were significant predictors of up-grading to 4+3 or above in both UVA and MVA analyses (data not shown).

TABLE 3
Logistic regression model for predicting upgrade
to GG2-GG5 in prospective biopsy GG1 subset

| | | UVA | | | MVA | | |
|---|---|---|---|---|---|---|---|
| Models | variables | OR | CI | P-value | OR | CI | P-value |
| (A) DV1 | Age | 1.04 | (1.02-1.07) | 0.002 | 1.04 | (1.01-1.07) | 0.005 |
| | log(pre-op PSA) | 1.24 | (0.98-1.58) | 0.07 | 1.13 | (0.88-1.45) | 0.332 |
| | % positive cores | 1.01 | (1-1.02) | 0.026 | 1.01 | (1-1.02) | 0.019 |
| | DV1 * | 1.27 | (1.14-1.42) | <0.001 | 1.29 | (1.15-1.45) | <0.001 |
| (B) DV2 | Age | 1.04 | (1.02-1.07) | 0.002 | 1.03 | (1-1.06) | 0.024 |
| | log(pre-op PSA) | 1.24 | (0.98-1.58) | 0.07 | 1.13 | (0.88-1.44) | 0.347 |
| | % positive cores | 1.01 | (1-1.02) | 0.026 | 1.01 | (1-1.02) | 0.03 |
| | DV2 * | 1.33 | (1.17-1.52) | <0.001 | 1.31 | (1.15-1.49) | <0.001 |

* per 0.1 increment of the model scores

Prediction of Higher Stage Disease at RP and Metastasis Post RP from Analysis of Diagnostic Biopsy Specimens

[0192] Next, we evaluated the performance of the classifiers in a retrospective multi-institutional cohort of 253 men with Decipher biopsy data who were treated with RP and had detailed clinical and pathological data available for analysis. Demographic and clinical characteristics of this patient cohort is provided in Table 2. The median patient age at RP was 63 years (interquartile range [IQR] 57-68) with a median pre-treatment PSA of 6.60 ng/mL (IQR 4.75-11.95). At initial diagnostic biopsy, 56% of patients had Grade Group 1 and 33% clinical stage T1 disease. Accordingly, pre-treatment NCCN risk groupings classified 42% and 28% of patients as harboring low- and intermediate-risk disease, respectively. Pathological analysis of the RP specimens revealed, only 29% remained with Grade Group 1 disease and due to up-grading, 38% had Grade Group ≥3 (i.e., Gleason score 4+3 or greater) disease in the prostatectomy. Similarly, tumor pathological staging showed that 46% had extra-prostatic extension, 14% had seminal vesicle invasion and 19% had lymph node involvement. The composite end-point of high-stage disease, defined as the presence of seminal vesicle invasion or lymph node involvement was present in 21% of patients. With a median follow up post diagnosis of 7.85 years, 27 patients developed metastasis and 10 died of prostate cancer.

TABLE 4
Patient Characteristics

| Variables | Study Cohort | |
|---|---|---|
| No. patients (%) | 253 | (100.0) |
| Age at RP | | |
| Median (Q1, Q3) | 62.6 | (57.2, 68) |
| Pre-Operative PSA | | |
| Median (Q1, Q3) | 6.6 | (4.75, 12) |
| Biopsy Grade Groups | | |
| Grade Group 1 | 141 | (55.7) |
| Grade Group 2 | 38 | (15.0) |
| Grade Group 3 | 27 | (10.7) |
| Grade Group 4 | 31 | (12.3) |
| Grade Group 5 | 16 | (6.3) |
| Clinical Stage | | |
| T1 | 142 | (56.1) |
| T2 | 81 | (32.0) |
| T3 or higher | 10 | (4.0) |
| Unknown | 20 | (7.9) |
| NCCN Risk Groups | | |
| Low | 90 | (35.6) |
| Intermediate Favorable | 29 | (11.5) |
| Intermediate Unfavorable | 39 | (15.4) |
| High | 72 | (28.5) |
| Unknown | 23 | (9.1) |
| Follow up time for Censored Patients (years) | | |
| Median (Q1, Q3) | 7.85 | (5.48, 10.9) |

[0193] We next assessed the ability of the genomic classifiers to predict the presence of lymph node involvement (LNI) upon final pathology at RP. As observed in the prospective cohorts, in the retrospective biopsy specimens both models had higher scores on average to predict patients with higher grade and stage disease (p<0.001) (FIGS. 7A-B). The AUC for predicting lymph node involvement (LNI) was 0.74 and 0.77 for DV1 and DV2 models respectively (FIG. 8). Similar results were obtained for the high-grade, extra-prostatic extension, seminal vesicle invasion (SVI) and a composite end-point (SVI or LNI). Using logistic regression, we found that every 0.1 increase in DV1 and DV2 model scores were associated with 18% and 40% increased odds of lymph node involvement at RP in MVA (Table 5). These data support the observation that there are many clinically lower grade patients at diagnosis that harbor high clinical-genomic risk disease which can be detected using the genomic classifiers described herein.

TABLE 5
Lymph Node Invasion. UVA/MVA Tables

| | | UVA | | | MVA | | |
|---|---|---|---|---|---|---|---|
| model | variable | OR | CI | p | OR | CI | p |
| Model 1 | BX Grade Group 2 (ref: Grade | 1.99 | 0.45-8.74 | 0.363 | 0.82 | 0.17-4.00 | 0.805 |
| | Group 1) | | | | | | |
| | BX Grade Group 3 (ref: Grade | 5.27 | 1.41-19.75 | 0.014 | 2.53 | 0.60-10.65 | 0.206 |
| | Group 1) | | | | | | |
| | BX Grade Group 4 (ref: Grade | 5.57 | 1.57-19.69 | 0.008 | 1.53 | 0.36-6.50 | 0.566 |
| | Group 1) | | | | | | |
| | BX Grade Group 5 (ref: Grade | 18.04 | 4.76-68.43 | <0.001 | 6.88 | 1.62-29.18 | 0.009 |
| | Group 1) | | | | | | |
| | Clinical Stage ≥ T2 (ref: Clinical | 6.38 | 2.45-16.61 | <0.001 | 4.52 | 1.55-13.16 | 0.006 |
| | Stage < T2a) | | | | | | |
| | Decipher* | 1.66 | 1.30-2.12 | <0.001 | 1.43 | 1.10-1.88 | 0.009 |
| Model 2 | BX Grade Group 2 (ref: Grade | 1.99 | 0.45-8.74 | 0.363 | 1.01 | 0.21-4.87 | 0.986 |
| | Group 1) | | | | | | |
| | BX Grade Group 3 (ref: Grade | 5.27 | 1.41-19.75 | 0.014 | 2.71 | 0.64-11.43 | 0.174 |
| | Group 1) | | | | | | |
| | BX Grade Group 4 (ref: Grade | 5.57 | 1.57-19.69 | 0.008 | 1.73 | 0.41-7.24 | 0.451 |
| | Group 1) | | | | | | |
| | BX Grade Group 5 (ref: Grade | 18.04 | 4.76-68.43 | <0.001 | 6.62 | 1.55-28.22 | 0.011 |
| | Group 1) | | | | | | |
| | Clinical Stage ≥ T2 (ref: Clinical | 6.38 | 2.45-16.61 | <0.001 | 3.98 | 1.35-11.75 | 0.012 |
| | Stage < T2a) | | | | | | |
| | Decipher V2* | 1.48 | 1.26-1.75 | <0.001 | 1.28 | 1.06-1.54 | 0.010 |
| Model 3 | Partin Table | 1.09 | 1.05-1.13 | <0.001 | 1.08 | 1.04-1.13 | <0.001 |
| | Decipher* | 1.66 | 1.30-2.12 | <0.001 | 1.57 | 1.22-2.04 | 0.001 |
| Model 4 | Partin Table | 1.09 | 1.05-1.13 | <0.001 | 1.08 | 1.04-1.12 | <0.001 |
| | Decipher V2* | 1.48 | 1.26-1.75 | <0.001 | 1.42 | 1.19-1.69 | <0.001 |
| Model 5 | Decipher + NCCN Low | Reference | Reference | 1 | — | | |
| | Decipher + NCCN Intermediate | 13.84 | 1.71-111.72 | 0.014 | | | |
| | Decipher + NCCN High | 48.47 | 6.20-379.22 | <0.001 | | | |

| | | | | | |
|---|---|---|---|---|---|
| Model 6 | Decipher + NCCN | 2.37 | 1.68-3.33 | <0.001 | — |

*Decipher and Decipher V2 reported per 0.1 unit increase

### Prediction of Future Metastasis

[0194] Finally, we evaluated the models for their ability to prognosticate the development of postoperative metastasis and BCR. Both models were significant predictors of distant metastasis. The addition of the genomic classifier models to clinical risk factors increased the AUC for predicting metastasis for DV1 and DV2 respectively. Similar results were observed for the prostate-cancer specific mortality end-point. Multivariable analysis further demonstrated that the prognostic information in the GC models is independent of clinical risk factors.

[0195] These results showed that genomic classifiers of the present invention are useful for predicting presence of higher-grade disease in prostate cancer subjects. These results further showed that genomic classifiers of the present invention are useful for predicting metastasis in prostate cancer subjects. These results suggested that the methods and markers of the present invention would be useful for diagnosing, prognosing, determining the progression of cancer, or predicting benefit from therapy in a subject having prostate cancer. The results showed that the subtyping methods of the present invention may be used to determine a treatment for a subject with prostate cancer.

TABLE 6
Univariate Analysis of Target Genes

| | coef | exp. coef. | se. coef. | z | Pr . . . z . . . |
|---|---|---|---|---|---|
| AC020571.3 | −1.018756 | 0.361043799 | 0.375053027 | −2.716298565 | 0.006601635 |
| ANO7 | 2.728934592 | 0.065288812 | 0.407289095 | −6.700239767 | 2.08078E−11 |
| ARL6IP1P2 | 0.211639304 | 1.235702092 | 0.157938082 | 1.340014397 | 0.180240664 |
| ASPN | 0.734576998 | 2.084600016 | 0.289962212 | 2.533354234 | 0.011297672 |
| AZGP1 | −1.081098477 | 0.339222692 | 0.227282585 | −4.756626977 | 1.96854E−06 |
| AZGP1P1 | −1.259174028 | 0.283888413 | 0.447362548 | −2.814661249 | 0.004882867 |
| DEGS1 | 0.815286842 | 2.259823792 | 0.272577955 | 2.99102267 | 0.002780449 |
| ERO1LB | 1.958519505 | 7.088824322 | 0.431696059 | 4.536801915 | 5.71137E−06 |
| FBXL8 | −1.902271331 | 0.149229285 | 0.527510253 | −3.606131483 | 0.000310796 |
| FMO5 | −1.562260035 | 0.209661693 | 0.801119597 | −1.950095892 | 0.051164691 |
| FTH1P2 | 0.940180631 | 2.560443872 | 0.276199928 | 3.403985792 | 0.000664102 |
| FTH1P8 | 0.197938579 | 1.218887527 | 0.207877904 | 0.952186721 | 0.341002294 |
| GLB1L2 | −4.026340996 | 0.017839485 | 0.847895107 | −4.748631004 | 2.04798E−06 |
| GLB1L3 | −5.550073036 | 0.003887173 | 1.064791391 | −5.212357164 | 1.86456E−07 |
| GLYATL1P3 | −0.620320485 | 0.537772062 | 0.23410423 | −2.649761971 | 0.00805485 |
| GMNN | 2.092700107 | 8.106774799 | 0.551073019 | 3.797500574 | 0.000146162 |
| HIF3A | 0.252313025 | 1.286998838 | 1.03815061 | 0.243040868 | 0.807973738 |
| INHBA | 2.684983887 | 14.65796519 | 0.765096464 | 3.509340344 | 0.00044922 |
| KIAA1210 | −1.02505771 | 0.35877576 | 0.853948067 | −1.200374764 | 0.229993825 |
| KRT15 | −1.670025537 | 0.188242258 | 0.626029324 | −2.66764746 | 0.007638436 |
| LIPH | −3.364385361 | 0.034583266 | 0.944887437 | −3.56062027 | 0.00036998 |
| LPAR3 | −0.844270997 | 0.429870621 | 0.436019683 | −1.936313953 | 0.052829261 |
| LPGAT1 | 1.220418809 | 3.388606616 | 0.389461365 | 3.133606872 | 0.00172672 |
| MIR4435-1HG | −0.367725003 | 0.692307538 | 0.604570586 | −0.608241637 | 0.543027223 |
| MKI67 | 6.792362118 | 891.0157626 | 0.946815078 | 7.173905732 | 7.28861E−13 |
| MLLT11 | 0.81044494 | 2.248908393 | 0.732562253 | 1.106315452 | 0.268590006 |
| MYBPC1 | −1.152171977 | 0.315949788 | 0.249798588 | −4.612403886 | 3.98039E−06 |
| NADK2 | 0.470137995 | 1.600215 | 0.636159807 | 0.739024991 | 0.459891822 |
| NR4A1 | −1.596285011 | 0.202647956 | 0.265223126 | −6.01864941 | 1.75878E−09 |
| NUSAP1 | 4.415561211 | 82.72825585 | 0.707849482 | 6.237994554 | 4.43216E−10 |
| OR51A6P | −1.959242252 | 0.140965197 | 0.66373524 | −2.951843046 | 0.003158834 |
| PABPC1 | 0.755077881 | 2.127777231 | 0.278842085 | 2.707905018 | 0.00677094 |
| PART1 | −2.421642916 | 0.088775647 | 0.651032126 | −3.71969803 | 0.000199461 |
| PCAT14 | −0.397683215 | 0.671874834 | 0.089040775 | −4.466304519 | 7.95823E−06 |
| PGM5P4-AS1 | −1.064105371 | 0.345036396 | 0.529431364 | −2.009902402 | 0.044441519 |
| PICK1 | −3.052693795 | 0.047231521 | 0.94395319 | −3.233946162 | 0.001220925 |
| PTTG1 | 5.054760024 | 156.7669056 | 0.720961903 | 7.011133323 | 2.364E−12 |
| R3HDM1 | 1.124121147 | 3.077510979 | 0.688704174 | 1.632226417 | 0.102631798 |
| RNA5SP121 | −0.159834272 | 0.852285025 | 0.28514785 | −0.560531219 | 0.575117152 |
| RP11-121G22.3 | 0.54826177 | 1.730242842 | 0.289930617 | 1.891010254 | 0.058622975 |
| RP11-159H20.3 | 1.086933391 | 2.965167109 | 0.387286134 | 2.80653836 | 0.005007695 |
| RP11-755O11.2 | −2.21597345 | 0.10904731 | 0.708352751 | −3.128347348 | 0.001757923 |
| RP11-770G2.5 | 0.656284161 | 1.927616298 | 0.511472642 | 1.283126615 | 0.199447721 |
| RP11-923I11.3 | 0.012186678 | 1.012261238 | 0.387323413 | 0.031463831 | 0.974899637 |
| RP13-753N3.3 | 0.391755198 | 1.479575464 | 0.350940795 | 1.116299967 | 0.264293756 |
| RPL31P57 | −0.723295796 | 0.485150661 | 0.142803819 | −5.064961152 | 4.08484E−07 |
| SCIN | −3.777998567 | 0.022868415 | 1.097206642 | −3.443288093 | 0.000574687 |
| SESN3 | 0.677784496 | 1.969509438 | 0.24823972 | 2.730362794 | 0.006326466 |
| SETP14 | 0.630624885 | 1.878784237 | 0.289203892 | 2.180554631 | 0.029216374 |
| SLC22A3 | −2.210758134 | 0.109617512 | 0.47027084 | −4.701031715 | 2.5885E−06 |
| SMC4 | 5.768903761 | 320.1865391 | 0.88769243 | 6.498764174 | 8.09824E−11 |
| TIPARP | −2.217536636 | 0.108876982 | 0.550632508 | −4.027253394 | 5.64322E−05 |
| TMEM100 | −2.882377174 | 0.056001479 | 1.005740682 | −2.86592481 | 0.00415793 |
| TNFRSF19 | −2.416480569 | 0.089235122 | 0.696215197 | −3.470881677 | 0.000518753 |
| TOP2A | 4.112985372 | 61.12893806 | 0.454912893 | 9.041259181 | 0 |
| TPX2 | 5.182498017 | 178.1272206 | 0.647974958 | 7.997991208 | 1.22125E−15 |
| TRIQK | 1.167161854 | 3.212861116 | 0.384612581 | 3.034642943 | 0.002408206 |
| VBP1 | 0.783207999 | 2.188481664 | 0.471928306 | 1.659591065 | 0.096996747 |
| WFDC2 | −1.140244348 | 0.319740884 | 0.746624189 | −1.527199849 | 0.126711324 |
| XPO6 | 0.374919547 | 1.454874361 | 0.425155032 | 0.881841962 | 0.377862276 |

TABLE 7
Target Sequences

| SEQ | | | |
|---|---|---|---|
| ID | | Affy | |
| NO. | Gene | Probeset ID | Sequence |
| 1 | MLLT11 | 2358694 | TCGCCAGGCATTTCGGGGCAAAACGAAGCGGAGCCCCCCAAA |
| | | | CCCCCAGACCTAACCAAGTTCAGAGATTCGCAGAAGCACGCC |
| | | | CCCCACCCCAAATTTATTGTGCTCTACCCAAAATGGAATAGGA |
| | | | CTAGGTTTATTTACCCATTGTGAGGGTAGAGAGGCGAGTCTGG |
| | | | AGGAGCAGGGATTGGGAGAAGGGGTGGAAAAATACTCTGATT |
| | | | CTTAAAAATACTTTGTAACCTAAAGTCCTTAAATTGTGGAAGAA |
| | | | AGGAATACTCCTCCTTTCCATTGTAGTCTAGAGTTAAGATTTCA |
| | | | AATCCATAAATTAGAGGACCTAAAATTAGAGGGCAATTAACTG |
| | | | CTCATTCATTGGGCCCCCAGTCAGCACGGGGGTGCTGGAAGA |
| | | | GATCGGGAATAATAGCGCAGACCAATGAGCCTAGGGAGATGC |
| | | | TTTCATCGTCTCTCCTTCCCTCAAGTGTTCTGGAACCTATCATT |
| | | | TGAATTAGCCGAGTCAGGCAGGAGGGGGCGGGGAATCCTTC |
| | | | CGCCCTTCTTAGGAGGGGCTGCATTGCAGGGGGAGAGTGAA |
| | | | CTGACAGACTCAGTCACTGAAGAGGGAAAAGGAGTGAGAAGA |
| | | | CAAAGCCGTCAAAGCCCCAACAGCTTTGTATTTCTCCAGCCCG |
| | | | GCGCAGA |
| 2 | MLLT11 | 2358695 | GGGACCCTGTGAGTAGCCAGTACAGTTC |
| 3 | MLLT11 | 2358696 | AGAACTGGATCTGTCGGAGCTGGAAGGCCTGGGTCTGTCAGA |
| | | | TACAGCCACCTACAAGGTCAAAGACAGCAGCGTTGGCAAAAT |
| | | | GATCGGGCAAGCA |
| 4 | MLLT11 | 2358697 | GTGATGGCCTCCTTGAGTACAGCACCTTCAAC |
| 5 | MLLT11 | 2358698 | TGGAGAGCTCCCATTGCCAGCATCCA |
| 6 | MLLT11 | 2358699 | TCAAGCAATGGAGTACTGGGTCACAGGGATTCCTCCTTTCCCC |
| | | | CCCAAATATTAACTCCAGAAACTAGGCCTGACTGGGGACACCT |
| | | | GAGAGTAGTATAGTAGTGCAAAATGGAAGACTGATTTTTGACT |
| | | | CTATTATAATCAGCTTCAGAGATTCCTTAAACCTTCCTAATTTC |
| | | | CTGCTCCAGGGCAGTAAACACAAATATTTCTTCAAGGGGTGAT |
| | | | GAAAACCTCGGAAGTTTTAATTTGAGGTTATCTGCTACGAAAC |
| | | | AGTATTTCTAAAAGGCTAAAGTGATAAGTCTCTTGCTTTTTTTT |
| | | | GATCCTGCTCTTATATTCTTTTTTTTCCTCAGAGAAATCAGGAG |
| | | | GGTAGTTAGAGGTATAAAACAGGAGGAAATATTATGGAAAATG |
| | | | AAAATAGGGAAAATAATTGAATCATTTTAGAAGTAGCTAATTTC |
| | | | TTTTCTCAAAAGAGTGTCCCTTCTTCACACCTACTCACTTTACA |
| | | | ACTTTGCTCCTAACTGTGGGTTGAAAACTCTAGCTAAAGAAAG |
| | | | TTATCAAATCTTAACATGCATTCCTACTATTATGATAGTTTTTAA |
| | | | GGTTTCAATTCAATCTTCTGAACGGCATAAGTCCTATTTTA |
| 7 | DEGS1 | 2382361 | GGGAGCGCGCCCAGCATCGCTTGGGCCTCCTCCACCCGCTC |
| | | | AGGAGGGGAAACAGGAGAGCCGGGAGCACAACAGCCTCGCG |
| | | | CGCCCGCCGCCGCCTCAGCCTTAGGGGAGGCCACTACGCCT |
| | | | CTGGTTACATTTCTTG |
| 8 | DEGS1 | 2382362 | TAGTCAGGACAGGATAAACAGTCGCTATATTAAGACCATGTAC |
| | | | GTGTCCCTAGACCTAGTTCT |
| 9 | DEGS1 | 2382363 | TCCGCCCACGCCTCCGTCTCCTCCGCGCTCCGCCACAGCCG |
| | | | GCCGACACCACACCAGCCGGGGAGCCGCCG |
| 10 | DEGS1 | 2382364 | CTAGTCTGCAAGCCACCGCTGTCGCC |
| 11 | DEGS1 | 2382365 | GACTTCGAGTGGGTCTACACCGACCAGCCGCA |
| 12 | DEGS1 | 2382366 | GTGAGGGCCAGCGGGCGCCCCGTTAT |
| 13 | DEGS1 | 2382367 | GGGCCCTGCGCGGTCGTGGGCGCCGGAGGCCC |
| 14 | DEGS1 | 2382368 | CGGAGCCGCGCAGCTCCGACCCTTCCGCGAAGAGGCGCAGG |
| | | | CGCGTCCCCGAGCGCGGGAGTCCCCGCCAGGCCCACGCCG |
| | | | GCCGGTTGGGGCGAAGGGTGTCCCCGGCTGTGCCAGCCTTG |
| | | | AGTAGATCTTTTCGCTAGAAGATTCCTGTGCCCTCAGGTGGGC |
| | | | GCCCTTTCCTCTCACCACTCCCTCTCCTCCGGAGCGGGCC |
| 15 | DEGS1 | 2382369 | TTGGGGCTGCCTGAGTGCTAGGCAGGGTGTGGTCCTGGGCAT |
| | | | CCTTGGGCCTACCAGCGAGCCCT |
| 16 | DEGS1 | 2382370 | GGTCTCAGATGATGCGCCTGCCATGGCCTCCCAAAGTCCTGG |
| | | | GATTACAGGCGTGAGCCACCCTGCCAGGCCACATATGATATA |
| | | | TTTTATCAATGCCTTATCTACATGTTACATAGGAATAATCTAGC |
| | | | GTCCTACCTGTGTAAAAACCAACTCTGGAATACTGAAACTGAG |
| | | | CTACT |
| 17 | DEGS1 | 2382371 | TTGATGAAACCTGATCCCAATTTGATATGGATTAT |
| 18 | DEGS1 | 2382372 | TCTGGAAGTTATCAATACCGTGGCACAGGTCACTTTTGACATT |
| | | | TTAATTTATTACTTTTTGGGAATTAAATCCTTAGTCTACATGTTG |
| | | | GCAGCATCTTTACTTGGCCTGGGTTTG |
| 19 | DEGS1 | 2382373 | TGGCCAGGCTAGTATTTTGTCAGTCCAAGCAGTTCATTAAAAA |
| | | | AAAAAAAAACAAAAAGAGCAAGAATATAAATACTGCATCTTCCA |
| | | | GCCTACTTTTACAAAGGGTTCACTCTTGGGTCCTTAAGCTTAG |
| | | | TGGT |
| 20 | DEGS1 | 2382374 | CTGGAGTTTCCTGGATGGGTGCAGT |
| 21 | DEGS1 | 2382375 | GCTGAATACTATGACAACCTCCCTCACTACAATTCCTGGATAA |
| | | | AAGTACTGTATGATTTTGTGATGGATGATACAATAAGTCCCTAC |
| | | | TCAAGAATGAAGAGGCACCAAAA |
| 22 | DEGS1 | 2382376 | ATATCATTAGTGCCAAAGGGATTCTTCTC |
| 23 | DEGS1 | 2382377 | AAGAGCTCGGTGATACCAAGAAGTGAATCTGGCTTTTAAACAG |
| | | | TCAGCCTGACTCTGTACTGCTCAGTTTCACTCACAGGAAACTT |
| | | | GTGACTTGTGTATTATCGTCATTGAGGATGTTTCACTCATGTCT |
| | | | GTCATTTTATAAGCATATCATTTAAAAAGCTTCTAAAAAGCTATT |
| | | | TCGCCAGGCACGG |
| 24 | DEGS1 | 2382378 | AAGCTATTTCTAGTTTATTTCACTATAAAGTTTTGCTTTATTAAA |
| | | | AAGCTAATAAACAGCTATTAATCAC |
| 25 | DEGS1 | 2382379 | CTATATAATATGGTAACTTGGGTACCGGGGGAACTTTAAAATTT |
| | | | CATCTCAAAAATAATTTTTAAAAAGCCTGAGGTATGATATAGCA |
| | | | TAAAAGATTGAGATGAAAATATATTTCCCTGTAAGCTGAATTAC |
| | | | TCATTTAAAAATTTTAACTTCTATATGGGACCCGAATTA |
| 26 | DEGS1 | 2382380 | CTGCTGAATCCTGTACAGCCTTACTCATAAATAA |
| 27 | FTH1P2 | 2384397 | ACTTTGCCAAATACTTTCTTCACCAATCTCATGAGGAGAGGGA |
| | | | ACATGCTGAGAAACTG |
| 28 | FTH1P2 | 2384398 | GAAAAAAGTGTGAATCAGTCACTAC |
| 29 | FTH1P2 | 2384399 | TACCTGAATAAGCAGGTGAAAGCCATCAAAGAAT |
| 30 | FTH1P2 | 2384400 | TCTGGCTCGGCGGAATACCTCTTAGACAAGCA |
| 31 | LPAR3 | 2420617 | TTCACGGGCCACCTAGACTTTCCAGTCTAGGACTAGAGCTGTA |
| | | | GCAATGATCTGTTGTGCTGTACAAGAAAAGAGAAAGAGGTGTT |
| | | | CATTTGAGAACAGATGTTTTTATACATCAGAGTAAAAGCTGTAT |
| | | | TGAAGAGCAGGCTGAATCCCTTCCATATAGAATGAAATATGAG |
| | | | CTTGACCCCAGTCCTTATCTTCAGTTACCTCCATACCAACTGG |
| | | | TGGCATGTTGGATTTAGCATGTAGAATAATTTCCCATCTCTTAT |
| | | | TTTTCCCAAGGTTAATGGCATCCTTCTGGTACCTGGCTTACAT |
| | | | GTGAACTGAATTT |
| 32 | LPAR3 | 2420618 | TATATATATTCCTGTTTTTACTGATTTTTATTGATTTTGTTCAAA |
| 33 | LPAR3 | 2420619 | TTACCTGTCTCTAACAAAGCCCATGTACAGTGTTATTTGAGGTC |
| | | | TCCATTAATCACTGCTAGATTTCTTTAAAAAATTTTTTTTCATAG |
| | | | TTTAAAAGCATGGGCAGTAAAGAGAGGACCTGCTGCATTTAGA |
| | | | GAAAGCACAGAAACGGGAGAGGTTCGGCGGGTCCCTGCTTGT |
| | | | CCTATGAACTGCTCAGAGCTCCTGTCAGTCCAGCTGGGCCTT |
| | | | CTGGGTTCTGGCACCATTTCGTAGCCATTCTCTTT |
| 34 | LPAR3 | 2420620 | CAGTCTGCAATAAAAGCACTTCCTAA |
| 35 | LPAR3 | 2420621 | GGTTCTGCTCCTCGACGGCCTGAACTGCAGGCAGTGTGGCGT |
| | | | GCAGCATGTGAAAAGGTGGTTCCTGCTGCTGGCGCTGCTCAA |
| | | | CTCCGTCGTGAACCCCATCATCTACTCCTACAAGGACGAGGA |
| | | | CATGTATGGCACCATGAAGAAGATGATCTGCTGCTTCTCTCAG |
| | | | GAGAACCCAGAGAGGCGTCCCTCTCGCATCCCCTCCACAGTC |
| | | | CTCAGCAGGAGTGACACAGGCAGCCAGTACATAGAGGATA |
| 36 | LPAR3 | 2420622 | ATGGGAGAGCTCCAGTGGAGAAGGC |
| 37 | LPAR3 | 2420623 | ATGGTGGATCGGCAGTACAGCACTGTTAGCGCAG |
| 38 | LPAR3 | 2420624 | TCCATGCCAAATGTGATCTTGAACTTGA |
| 39 | LPAR3 | 2420625 | TCAGCGTCAGGGAAACCTGGCAGCAGTTAATGAGGCCTGGCC |
| | | | ATGGCTGTAGGCCAGGTTGGGAATCAGGAAGGGTAGATGCAT |
| | | | CCTC |
| 40 | LPAR3 | 2420626 | ACTGGGAGAACTAGTGAAGATGCTGAGGTGACACAGCAGACC |
| | | | CAGGTTGTTCTGGAGGCTCTACCTGAGTTTGCATGCAGCTTAG |
| | | | AAACTAAAACTGTGTCTTCTCAGTTGCATGGAGTGGACTCTCA |
| | | | GAAGGACATAGAGATTGTC |
| 41 | LPAR3 | 2420627 | GACTCCTTATCACCAGGCTCGAGCACTAGCAGGAGGGACACT |
| | | | GGTGCTACGTGGCAGAGACCTTCTTCCAGTTATCTTAGCAACT |
| | | | GGTGGATCCCAGGGACTCCCCTTAGAGTTTCTACATTATTGGG |
| | | | CTTTCAGAACTGGACTCACCAATGAGTCAGGGAGACAGTGTTC |
| | | | CTGCTCTCTATCTGTGCTGAGTCTGCCTATCTGGGCCCATGAC |
| | | | AAGGCTTATGATA |
| 42 | LPAR3 | 2420628 | ATGCAGGCCCAATTAAATAGGCCTGTGGCCAGTCTTCAGCCC |
| | | | ACAGCTGAACTGCCTCATCTGGCAAGAAAGAGCCCATGTAGG |
| | | | ATCTTGAGTGT |
| 43 | LPAR3 | 2420629 | TGTGGCGGAAAGATCCCATTACCTCAAAGAATCAATACTGTTG |
| | | | AGAGATTTGACCAAGTTCACTTTGTAAATTACTGCAGCATTGTG |
| | | | GCTGCAGCTCTGGACCTTCTAGTTCCTGCTTCTTCTAGTGGGT |
| | | | CCCAACTTCTTGC |
| 44 | LPAR3 | 2420630 | TTGTTTTCAGGGCAGGCCGTCAATCGGTGGGTGCAAAAATGC |
| | | | AGTTGCCACTCAGTTGCTGCCCCTACGCTGCTGTTTGACA |
| 45 | LPAR3 | 2420631 | GAAGGCAAAGTAGCAGTAAGCAACGAAACGATAGCTCAAGTT |
| | | | CTCATGCTAGGAGGAAATGGGTGA |
| 46 | LPAR3 | 2420632 | ATACAGCATGATAGAGACAAGGATTCCAAAATCCTAGGTGGAG |
| | | | AGAACAGGACCCTTTGTGAGACAGTCATGGTCACA |
| 47 | LPAR3 | 2420633 | CCTCATCATGGTTGTGGTGTACCTGCGGATCTACGTGTACGTC |
| | | | AAGAGGAAAACCAACGTCTTGTCTCCGCATACAAGTGGGTCC |
| | | | ATCAGCCGCCGGAGGACACCCATGAAGCTAATG |
| 48 | LPAR3 | 2420634 | ACACTGCTCATTTTGCTTGTCTGGGCCATCGCCATTTTTATGG |
| | | | GGGCGGTCCCCACACTGGGCTGGAATTGCCTCTGCAACATCT |
| | | | CTGCCTGCTCTTCCCTGGCCCCCATTTACAGCAGGAGTTACCT |
| | | | TGTTTTCTG |
| 49 | LPAR3 | 2420635 | TTCTAATTCTCTGGTCATCGCGGCAGTGATCAAAAACAGAAAA |
| | | | TTTCATTTCCCCTTCTACTACCTGTTGGCTAATTTAGCTGCTGC |
| | | | CGATTTCTTCGCTGGAATTGCCTATGTATTCCTGATGTTTAACA |
| | | | CAGGCCCAGTTTCAAAAACTTTGACTGTCAACCGCTGGTTTCT |
| | | | CCGTCAGGGGCTTCTGGACAGTAGCTTGACTGCTTCCCTCAC |
| | | | CAACTTGCTGGTTATCGCCGTGGAGAGGCACATGTCAATCATG |
| | | | AGGATGCGGGTCCATA |
| 50 | LPAR3 | 2420636 | ATGGACAATAAATTCTTAAGCAACAAAAGAAAATACTGGGTCA |
| | | | CAAGCAACTGGGTAGCTCTGATGGA |
| 51 | LPAR3 | 2420637 | AGGAACTAGTTATCCTGTGGAGATCTGGACGTCTAACTATTTG |
| | | | GACAACACTTACATTGATTGTCACTATCATATAACTAAGAAAAT |
| | | | AGGTCATTTTGGCAAAAATTTTTTCTTTGTCTTTAGAATTTGAAA |
| | | | CTTTGAGGTTTTGATTTAATTACATATGACACTCCTCTTGTCTA |
| | | | AACCTTTCAATTGCATTTATCAACTACCACTCTTTTTTTTTTTAT |
| | | | CAGATCAGACCTATTTTAGATATCTTGCTGTTCTGCAAGATATT |
| | | | TGTTAGAACAGGCCTGCATATGTTTTCTATGAATGGAGACTGA |
| | | | ATTTAAAACATTAAAGTATGAGATTGTTTTTCATGTGTGTTCAC |
| | | | CGGAATCTGTTTAAGAAACTACAGCATGTTAACTCTCCATCTCA |
| | | | TTTTTCAGAAACACACGTGCACAGTGGAAGAAATGCACACACA |
| | | | GCATTGTAGCCAGGC |
| 52 | LPAR3 | 2420638 | GGGCTCGGCGGCGCGGGTGAACGTGAGCG |
| 53 | LPAR3 | 2420639 | CTGGAGAGGAGGCGCTCCGCCCGCCCGCCGCGTCCTCCGCT |
| | | | GCTTCTCCGCGCCCGGCTGGAGCCCGGCGCCCGGTCGCCCC |
| | | | GTCGCGCTCGACCCCGAGGGCATGCGGCA |
| 54 | FMO5 | 2433231 | TTGGCAGTGCAATCAGCCTTTGCTAATGGGACTATTCCTTTTAA |
| | | | TCTGGTAGCTGCAGCTTCATACTCAGGAGCAAGTCTCTTG |
| 55 | FMO5 | 2433233 | GTCTGAGAAATTGTCCCGGAATAAAGGGGCCTAAGGAGACAT |
| | | | AACATCTAAATGTAATGTAGTATCCTGGATGGACTCCTGCAAC |
| | | | AGAAAAAGAACTTTAAGTAAAAATTAAGGGAATATTAATAAAGT |
| | | | ATGCATTTTGGTTAATAATGTATCAATATTGGTTTATTAGTTGTG |
| | | | ACAAATGTACCAGAGGAATGTAAAATGTCAACAATAAAGGAAA |
| | | | TTGGATGTGGGGTACATGAGAATGCTGTACTATTTTTGCAACT |
| | | | TTTCTTAAATCTAAAACTCTTATAAAATTTAAAAATAAAAAGAAA |
| | | | TGTGGAGTTATTATTATTATTTTTTGGCTCAGGATTTGACCCAG |
| | | | AGCTATGGTCTGGCAGA |
| 56 | FMO5 | 2433234 | CCAGTTTTTCTCATGTCGTAAAGTGTAGTTCTGAAAAACAGAG |
| | | | CAAATGAAATGCAAAGCAGGTACTTGGGTTTACATCCCAGTGC |
| | | | CACTGATGATTCTGTTTTCTCATCTGTGGAAGTTTCACTGTTCT |
| | | | TGTTTCATGGAGAAATTAACTAAGTGTCAGCTGTCAGGCACAC |
| | | | TGAACTCAGGTGATGTTCATTAATAGCTGTTGTACAATATGTTT |
| | | | GTATTTGGATTGCTGCTTATTACTTAACAACAGGATAAACCTGA |
| | | | ACAATGGAAAAGACCAACATTAGAGAGTATTATCTTTCCAAATA |
| | | | CACACACCTGTAAGAGAACTGGAAATGTGAGAACTACAACTTC |
| | | | TTCTTATTTAAACATTTGAACAATTGCCGGCCCTTTCACCGAAT |
| | | | TTACCTGTGGAATGCCTTTTGAGAGTTAGAGAACTGAGAACTG |
| | | | GTATTACTTTTCAGGTCTTTTGCTTTCCCTAATCCTTGTGATAC |
| | | | TGGAGATTTATCATCTATTAAAATGGACCTAGTATTTTTAAATCT |
| | | | GCATATCAAAAGCAAATTGAATGTCTCTTGCTTCCTTTTAATTT |
| | | | CTTTTAACATATAAATTTCTCTTTTAGCATGTAAATTTGTTGAAT |
| | | | TAACAGCCCTTTGATAATATAATTCCTAGTTATCAGCAATAAGT |
| | | | ACACCAGTTTCTTTTTTAAATTAGGAGTATGTAATTCTAAATTAA |
| | | | TTGATTCTCTCATTGTACATATTATATGCAAGGTTACAAAAAAA |
| | | | AATCAATGGTTAATGATTTTTTAGCTCAACCAAGCTAAAAGATG |
| | | | TGAACAAGAAATTGAACTCAAAACAACTTAAGATACAAAGCTCT |
| | | | TGTTACTGATAATGTCTAATAATATTCATCAATTTACCATATCTT |
| | | | GCTCTTATATTAAAATGTTCTATCATTTTCCTAATTATTTTAAAG |
| | | | TCGATTACAAAAATATATATATATTCTTGTAGTGCCAGAAAATT |
| | | | GAATACATTAATAAATGGGGTAGAATAGATGAATCTCCCATGA |
| | | | AGAAGAATTCCAAATAATTTATGAACTCTGCCCTCAAGGATATG |
| | | | GAGCAGAACTTCCTACTTCTCTAGTGTGAGCTGAATAGTGACT |
| | | | TCCTTCCAAAAATTACATATGGAAAGGGGGAAAATAACTTTGTA |
| | | | GTGGAGAAATCTGATAAACACTATCTCGGCTAGGTTATCAAGA |
| 57 | FMO5 | 2433235 | TCCTTGTGGTAATCCCTAGACTGGGAGCTCAGGTACTCTTTTA |
| | | | GTCATCTTTGTATGTCTTTAGCAGAGTTCTTGACATGTGGTAG |
| | | | GTGCTTAATAAATGTTTGTTGTTTATCAAATTTTATGGTAGGGA |
| | | | GAGTAAGTCAGCATCGGTATAAAATCGCTTACTCCACGTAACT |
| | | | CTTCTTCTGATAGGG |
| 58 | FMO5 | 2433236 | TCTTTGCTATAATTATAGCTTACTTCTAG |
| 59 | FMO5 | 2433237 | GTAGTTCTATGACTTCAACAATGACAATAG |
| 60 | FMO5 | 2433238 | GCCAACGCCATACCATTCAGGGAGACTACATAGATACCATGG |
| | | | AAGAGCTTGCTGATTTGGTGGGGGTCAGGCCCAATCTGCTGT |
| | | | CTCTGGCCTTCACTGACCCCAAGCTGGCATTACACTTATTACT |
| | | | GGGACCCTGCACTCCAATCCACTATCGTGTACAGGGCCCTGG |
| | | | AAAGTGGGATGGGGCTCGAAAAGCTATCCTCA |
| 61 | FMO5 | 2433239 | GATGGCAGAAATATCTAAAGCTCAAGAGGAAATTG |
| 62 | FMO5 | 2433240 | GTCTAAAGACATTGCCCTCACAGAGTGA |
| 63 | FMO5 | 2433241 | TTCACGGAGACAGCTGCCATATTTGAGGATGGCTCCAGGGAG |
| | | | GATGACATTGATGCTGTTATCTTTGCCACAGGCTATAGCTTTG |
| | | | ACTTTCCGTTTCTGGAAGATTCCGTCAAAGTGGTCAAAAACAA |
| | | | GATATCCCTGTATAAAAAGGTCTTCCCTCCTAACCTGGAAAGG |
| | | | CCAACTCTTGCAATCATAGGCTTGATTCAGCCCTTAGGAGCCA |
| | | | TTATGCCCATT |
| 64 | FMO5 | 2433242 | AAACTATTGACCTGTGGCCTTATCATATCACACACAGAATATTA |
| | | | TTGTTACTTGAGAAATCATATATGCACTCCTCAAACAACACTCT |
| | | | TCCTTCACTCCTCCAACACTCTCCCTTTCAGTGCATCCAGGGT |
| | | | CCAACTTCAGATCTGATCTTGATCTGTGCCAACCTAGTATAAAT |
| | | | TAGACCTTTTCCAAACTTCATGCATAGACCAAGGGGAAGATTA |
| 65 | FMO5 | 2433243 | TGGGAGTGCAGGGATAGTGGCCAAAGCACAAGAATAAGGACT |
| | | | CTTCACACTGGCTAATAGTAAAGCCACCTCTACCCATACATTA |
| | | | AGAA |
| 66 | FMO5 | 2433244 | TCGTGTAGGGGACTACGGATATCCTGCTGATGTGTTGTTCTCT |
| | | | TCTCGACTTACACATTTTATATGGAAGATCTGTGGCCAATCATT |
| | | | A |
| 67 | FMO5 | 2433245 | TTCAAAGGGCAGTACTTCCACAGTCGAGACTATAAGAACCCAG |
| | | | AGGGATTCACTGGAAAGAGAGTCATTATAATTGGCATTGGGAA |
| | | | TTCTGGAGGGGATCTGGCTGTAGAGATTAGCCAAACAGCCAA |
| | | | GC |
| 68 | FMO5 | 2433246 | ATGAATGTCTTTGATGGAGTCATGGTTTGCACTGGCCATCACA |
| | | | CCAATGCTCATCTACCTCTGGA |
| 69 | FMO5 | 2433247 | AAGGTCTCAGGACATATAGGGGTCAGGAGAAGAATAGGCATT |
| | | | TAGTGCATGGAGTGTCATAAAAGCACAGGAGAAGCCCAGGCT |
| | | | TTACTCAGGTGTTACAGTGCCTTAGGACCTGGACCAAGAGAC |
| | | | CTAGTGACTTGCACTTTTCTAGAAGAGGAGGGTACATTAGCCT |
| | | | GCCAACACTATGTTATTTTTTTCTGTCTTGTGGAAATTTTCTCAT |
| | | | TCTGACTACAGCCCCAAACAGTTCTTATTTGTGGAGTATGAAA |
| | | | ATCAAATATCCCTGCATGGGTCCTATTATGTGATA |
| 70 | FMO5 | 2433248 | GAAAAGGAGCCCTATAGCTCAGTCACTTAT |
| 71 | FMO5 | 2433249 | TGGGCCCGTAGAAGCACATAGTGTTTCCTTAACCTAAGTAGGG |
| | | | TAACCCATATTTATTATTTTTTATAAAGCTAAAAATCATAACACT |
| | | | ATCCTGTTTCACAGCCTCTTTCTTTATAGTTCTTTGTAAAATGG |
| | | | GTATTTATGGGAGCCAAAGGGAGATTCATTTATATAAAATGAG |
| | | | AGCCACTGAGGTGTTTTTCTACCCTA |
| 72 | FMO5 | 2433250 | TGCACATGTATTTATCCTACCCAGGCAAAAACTCCATTCTTTGT |
| | | | CCTCCTTTGCTCCTCAAAAATATTCAAGGGACAGTCTCTCTTTC |
| | | | ATATATTTTGGCTGCAGATACAGGAAGCCACCTGGCAGAGTGT |
| | | | TTTCATTACCTTCATTTCACATTATTTGATTGCAATAAACAGATG |
| | | | AAGGGAAATGTTTTCCCCATTACAGAAGGGAACTGATAGGTAT |
| | | | GGGAACTTTAAAACTCTCTGGTTCCACAACTTGTCCATTACTG |
| | | | CTTAGCCCTTTTGTACTTTCTGAAGTACTTTCCAATATATTTGTT |
| | | | TACATGAACATCATAAAAACCCAGTAAAGTATAGCTCTTGGGT |
| | | | AGTTAACTCTGGTGTAGAGGGGAGAACATGGAATTGCAGAATA |
| | | | AAAACCTGAATTCTGGTGCTTGCCCTACCACTAACTAACTTAG |
| | | | ATGTTAGACAAGCAATTTCCTCAATTTCAATTTTTAAAAATTTTC |
| | | | TTGTTTGTAAAACAAGATGATTGTACCAGATCACTTCTGTGGTT |
| | | | CCTTCCTGCTCTAAAGTATTCTAGGACTTTTCTATAATTTCTGA |
| | | | TCACGACCATAAAAGAATTTTATGGTCAGATATTTCTGACAGCT |
| | | | GGCAAAAAGCCCAAACCTTCTGCCTTCTGATCATCCTGCTAAG |
| 73 | FMO5 | 2433251 | AATTGTGTGGGTATCTTTGTGTTTGAAGTTGTTTGCCAA |
| 74 | FMO5 | 2433252 | AGGAAGGGCCAGTATTTACAAATCAGTGATCATCAATACTTCT |
| | | | AAAGAGATGATGTGCTTCAGTGACTATCCAATCCCAGATCATT |
| | | | ATCCCAACTTCATGCATAATGCCCAGGTCCTGGAGTATTTCAG |
| | | | GATGTATGCCAAAGAATTTGACCTTCTAAAGTATATTCGATTTA |
| 75 | FMO5 | 2433253 | GAGCGGGCTCTCTTCCATCAAGTGCTGCGTAGAAGAAGGCTT |
| | | | GGAACCTGTCTGCTTTGAAAGGACTGATGACATCGGAG |
| 76 | FMO5 | 2433254 | GCGACACTAACAGGTGAAGATCTCGGGAGACC |
| 77 | FMO5 | 2433255 | TGAGATCCGGTACCGCAGCAGAGCACTCTCAGCTCTGGGTCT |
| | | | TGCAGGCGCAGGGCTCCCCCATGCCAGCAGAAAGATTTCCTC |
| | | | TGGTGAAGAGGACCGTCGAATCTGTCCTCCTCAAGACACCTCT |
| | | | TGTACAGAATTTATTCGAATGCCACGGCCAAGGTCTTCCTTGA |
| | | | AA |
| 78 | FMO5 | 2433256 | AGCCCACGTTTTATTCCCATCGAGGGAGGGAGAATGGGTGCC |
| | | | GCTGAGTGGGCGGGGGAGTGGTCCCTGAAAGGAGGTGGAGT |
| | | | GCTACAGCCCCTCCCCGTTGGCTCTCGCTGTTTGTCCGTTGTT |
| | | | GGTTTATACTAATTTGACAACAGCCGCCTGTTGAGTCTCCTCC |
| | | | AGATCGCAGCTGAAGGATCTGTTGAGCGCTTCAGGAAAGGC |
| 79 | FMO5 | 2433257 | TCCGCCCACGGCAGGAGCGAAGGAAGGCCCTGGCGCGGGC |
| | | | GGGTAAACTGCCCACCGGGCGGCCCACCCGCTGCGCCCCCG |
| | | | GCCCGCAAGAGGCAGTCCCAATAGGTTGGCCCGCCTGGCCG |
| | | | AAGTCCGCCCGGAGCCCGCTCACCTGTCAGCC |
| 80 | FMO5 | 2433259 | CTGTCCTTGGTGTATAATTCCTACAACTGGAACTGTTTGTGCAT |
| | | | CTTACTTAAATTTATCAGTTAATATTAGGTATTATGAGTTCCCCT |
| | | | TGGCCTTAACCCCTACTCTTATCAAAGAAACATGTTTAGAAAAT |
| | | | GAAGCTTATCTTCCACAGGACTTTAGGCATAAAATGTGATTA |
| 81 | FMO5 | 2433261 | GCTGGTGAAAAGGAGTAGGTTTGGA |
| 82 | FMO5 | 2433263 | GTAGTAGTATTCTAAGAATCGCGTGATGTTTTCTTA |
| 83 | FMO5 | 2433264 | AATGTTGGATTAGATACTGAGGCTGTAGTCCCTGCTGTAACGG |
| | | | ACATGTTGGAAGCTGGTGTTCTAGATACTTACCTGGGAAAACA |
| | | | CTGGTCTATCAAACTCGCTGCTAATGCTGCAGTCACTGTACTT |
| | | | AGAGTGGGTCAGGTAATC |
| 84 | FMO5 | 2433265 | GAAGTAATCTCTAAACTTTATGCAG |
| 85 | FMO5 | 2433266 | ACTGGCAGAAATACTCTGGAGAAAACTCTGG |
| 86 | FMO5 | 2433267 | AGAAGTTTGCTGAGGCGTTTGAAGCTATTCCC |
| 87 | FMO5 | 2433268 | ATATGATGTTAGTGAAGCTAAACTCAAAATGGGATGTCTGAAG |
| | | | ACTCTGTAAAACAGT |
| 88 | FMO5 | 2433269 | AAATAGCAGTGTACTCTTGTCCTTTTGATGGCATGATAACAGA |
| | | | AACTAAG |
| 89 | FMO5 | 2433271 | GAGATACTCAGGTGGTGGTTTTTAAGCATGAAAAGGAAGATGG |
| | | | CATCATTTCTACCATAGTACTTCAGGGCTCTACAGACAATCTGA |
| | | | TGGATGACATAGAAAGGGCAGTAGATGATGGTGTTAATACTTT |
| | | | CAAAGTTCTTACAAGGGATAAACGTCTTGTACCCGGAGGTGGA |
| | | | GCAACAGAAATTGAATTAGCCAAACAGATCACATCA |
| 90 | FMO5 | 2433273 | AATGAAGTATTTCTGGCCAAGCTTATTGTTCAGGCATGCGTAT |
| | | | CTATTTTTCCTGATTCTGGCCATTTCAAAGTTGATAACATCAGA |
| | | | GTTTGTAAAATTCT |
| 91 | FMO5 | 2433275 | GTACAGCATATGGACGAAATGGAATGA |
| 92 | FMO5 | 2433277 | AATTCTCTCTTTGACATGGGCTTTCTTTTTAAGAACCCAAGGCA |
| | | | TTGTTTTGTAGAGAGTCTCTAAATTTAGACTTGCATAATTTTTTT |
| | | | CCTTTATTATATTCAGGTTAAATGTTTTTGACACATATACTACAT |
| | | | AGGACATGTTGATCTTAGTGGGTCACATCAAGAACCACATTAT |
| | | | GTCAGTTTATCTCACAGTAATAATGCTAAATTTGACCACTTAGA |
| | | | TAAGGTGGTATAGATACCATCAAGTTTCTCCACTATAAAGATAT |
| | | | TTTTTCCCGTTGAAGTTAATCAGTGGGGTGA |
| 93 | FMO5 | 2433279 | CACAGTGAGGAGGTCTATGCAAACCTACCCCAAAGGCTGAGG |
| | | | AAGCTGAGAGGCTGAAGAAAGAAGCTGACAGATTCAGTTTCTT |
| | | | AGAAACATTTCATAGGGACTTATGAACAGAAGCCATGTCTGTC |
| | | | TCAGGCAGTGGTGAGACAAGATGGTAGATCCCCATACCATTAT |
| | | | CTCCTGACCCAGGGATGATATACCACAGGGGAGGGGCACACA |
| | | | TACTTCAGAGCGAATGGGTAGGAGTTTGCCCTAAGGGTGGGA |
| | | | TTTACAGTAAGTACATACTATTAAACAACAGATTAACTGGAAAT |
| | | | CTCAGAGGTATTCCCGAAACCAGGGTTGATCAGAAGTCA |
| 94 | FMO5 | 2433281 | CAGTTCTTTTTGCATGATACCCAACAACAAA |
| 95 | FMO5 | 2433283 | GGACCCATGGCGAGAGCCATCTTTAATATCATTGGCTTGTCAA |
| | | | ATGGGCAGTTCTAAGGGAGCTTGGCCTTACCTGCTCTGGGGA |
| | | | ATTGCAGGTTGCCACATAACA |
| 96 | FMO5 | 2433285 | CCCAACAGAGAATAGGGATACCTGCACATAGCCCTTCAGTGC |
| | | | CAGTGGCAAATATAGGGCTTCGTTTCATTACCTCAGTTGGCAA |
| | | | CATGGTGATTGGTGCTAATA |
| 97 | FMO5 | 2433287 | TTCATTCTAGTATATAAAAAAGCAAATGACTGGGTGCAATGGC |
| | | | T |
| 98 | FMO5 | 2433289 | CCAGGTATGCTGTAGAATATCCCTCAGTTGGGATTTATCTTATT |
| | | | TTTTTCTCATGGTTAAATTGGGGTTATGACTTTTGGGGAGGAAT |
| | | | ATTATAAGGTGCCATTCTCCTCACCTCCCATCAAGGGTACATA |
| | | | CTATCCACATTATACCCACTGTTTTTTTTTTTTTTTTTGGAAACT |
| | | | TAAAACTCATTTTATGTTATTATAAGTAAGAAATTAGCATTCAAT |
| | | | ATATGCCACAATATATCTTTGTTGAAGTGTAAGTTTGTTCCACT |
| | | | TTTCTATTTTTCATTTTCCAACTTTTATTTTAGGTTCGGGGGTAC |
| | | | ATATGAAAGTTTGTTACAAGGATAAATTGTATGGGGCTGGTAT |
| | | | AACTGCTAGCCATATGCAGAAGATTGACACTGGATCCCTTCCT |
| | | | TTTGCCATATATG |
| 99 | FMO5 | 2433291 | AGCTCGATGGGATCCGCATCGTGTGCAATCACCACCAGCTGA |
| | | | GTCTTCTTGTTCTCCACCAAGGTGGTGATTGTGTTAACCCCTG |
| | | | CTGGAAAGACGGGTGGTGTCTCGATGGGGGTATCCCCTTTGC |
| | | | TAGCAGCTTTCTTCTCAGTCCAGGACAACAGTCTCTGCTTCTT |
| | | | CTCTTGTTTTGTCTCTGGTCTGTGCTTGTGGGCCCGCGTAAGC |
| | | | AGTCAGTAGCTGTT |
| 100 | FMO5 | 2433293 | CGTCTGATTGCCTGAACTGCCCGTCAAGGAGGTGGCATGTGT |
| | | | TCATCATTCATTTATTATTTAATCAACATCGACTATCATGTGTCA |
| | | | GACACTCCGCTGGGCCCTGGGGGTTCTAGAAGTAAGACTTGT |
| | | | TCCGTGCCCTCCAGTGATTCACGATAAGATCAAACTGTTCTTG |
| | | | TTCGGTTTACCTAGTGATAAATTGATTTAGTCCCTGAAATCCCT |
| | | | TTCTTACTGCCTGTGACCTGTAGGCCAAAATTGGGAACCTCTG |
| | | | AATAGTAGTAAATTAAAATCACCAAAGACGTCATTGTGGCAGT |
| | | | GGGTATCTC |
| 101 | LPGAT1 | 2454486 | GACCACTGGGTCTTGGGAATCAGTAGGGGCTGTATCCAGCAC |
| | | | ACCACTGCCCCATCCTTTTTTTCTTAACTATTAGTGTTGAATAA |
| | | | ACTTCTCATAGTTAATCTACTTGCTGAACTCAGGAAATTCCTAT |
| | | | CACTGACCCTGGCCAGGGCTTTAAAGGGTAGGAAAAGCATTA |
| | | | ATGTCAGTCCTACACAGCGAACTTTTGATTTAGAAGAATGTGA |
| | | | CAGAAAGAAAACATTTACTGAAATACATGGGAAGCTTGCATAT |
| | | | TTCTAAAGTTGTCTTTATACTTTTCATTTCTCAAAGCTAAGTAAA |
| | | | CTGTGGTATAGGCATCTCTAAGATGTTAGCATTTAAAACATCAA |
| | | | TTGTTTTATTGATGTTTAAACAATTGTTTAAATCCCACTGAAAAA |
| | | | TTTAAATATTAAAATATCTTGCACAGTCTACCAAATGAGTTAAAT |
| | | | CGTTACAGTCGTGTCTACCTCTTATTTTTCTATCTGTATTTAGG |
| | | | CTGCTGTTTTGGTGAGATTCTAATTTCTTTTTCCCCTGGAACTA |
| | | | CTTTCTGTGGAAGACAAGGAACAGACTGGGGACAGAGGCCTG |
| | | | AAAACAAATTGGAAGCACTCAGAGATCTATTGCTGACCAGCCC |
| | | | TATTCCTCATGAGTTG |
| 102 | LPGAT1 | 2454487 | CTCCAGGGTGACAAATGCCAATAGATATGTGAGTTAATTTTTTT |
| | | | AAATATCTCCGTGAGTTGTAAATAGATGTGTATTTGATCTGCCC |
| | | | TATCCTTCTTTGATTCTTTAACATGTTCTCTCTCTTCTGTTTGCA |
| | | | AAATATGTTTGAAAGCATTGGTAGTGCTTTCCTTATCAGTAACT |
| | | | GGAGTTCTCCTGCTTGCACTAGAGAAGGTAAAGAGAGAATCA |
| | | | GTATTCTTATATGGCAATCTGGGGAAGCAGCAATATGCCACTG |
| | | | TACAAAACTGAAGAAAAGTTCCTAATTTGTACTTTGTGAAGGGA |
| | | | GATGAAAGGACGTTTAAAGTATATATATTTTGTCAAGAGGAAA |
| | | | GAAGATAAAACTATGCCAGTTTTATATCAATAGCTTGTAGAAGC |
| | | | TCAGCTCTTCTTGGTCTTGGCTAGACTGCCTAGATTCCCACAG |
| | | | CAGACAAGGTTGAGAATCCATTGCTGGAATCTTGGTATTGATG |
| | | | AGTTACAGTGATGGAACATGTGCTTGGCCACAGGCAGGTCCA |
| | | | GTCACTGCAAAAGTGACCAAGCCAGCAGGTCACCCTTAACTTC |
| | | | AGAAACAATTATTGGTGGTGAACTGTACTTAAATTGCAGAGAA |
| | | | ACCTGTAAGTAATGGAAGGTAAAGAAAAATTACAGAATGGAAA |
| | | | ATAATATTTTGGGCAAGCAAACAAATTCACTGAGAATTCCAAAA |
| | | | GTATATTAAAAAAGAAGATAGCTATGAGTTCAGATCTATCTTAT |
| | | | TGGTCTTTAATATTACAACCAATCCTTAACTTTCCACTATAAAG |
| | | | GAAGGATTACTAGATTGATTACTTTCTGGATAGATAATCTGGTA |
| | | | ATAAATGATAGGTAAATCAAAAATTACTTTTATTTAGGAGTTTG |
| | | | AATTCTTACTCTCATCAGACATTTTTTTTCTAGGGACGCTTACT |
| | | | AATTAAATGATTTAAGTTGTTTCTTAGGGGTTTTTTGCCTATATA |
| | | | TTTATGACTGTGTTAATGAGTAGTGAAATGATGCGGAAAGACA |
| | | | GCTATCAGGAAGAGGAAATACAGAAGCCTGAATAATCTATGGG |
| | | | TTAGAAAAGCATCCCTGAATAATCAAAAATTGGCAGTATTGGC |
| | | | ATTGTTCTCAAGCCTTTTTATGAAAATGAAATCTGAAATCACCA |
| | | | AATGTAAACCTGGGAACATTATTCTAGTGTTGCTGTCTTGGATT |
| | | | CATGTTAAGAAGCGTCTTCATTCTTTGCTCATGTTGCCCACTTC |
| | | | TTGTGGATTTGTCTGAGTGTTTTTTGACAATCACTTCCTTAAAG |
| | | | ACTCTTCTGAACTAGTTGGACCTGGTTAATC |
| 103 | LPGAT1 | 2454488 | GGTCACCGTAGGAGTTCAGACTTTCTTTCATAAGTGTGCATTA |
| | | | TTTTACATGTGCAAATCAGAATATATTTAAAAAAAAGCAAAAGA |
| | | | AATTCAATGGATGGATTAATATTTATCCCCCTTTGGGATATTTT |
| | | | AAAATCTACTAAAATGAGGATTAGTAATATAATGACCTGCTAAT |
| | | | ATATTTTAAGAACATGTTTTAAAAAGATACACTCTATCACATATT |
| | | | TAAGCAAACATCACATTTGGAGAAGAGGAAATCATAAAATCAT |
| | | | CCTAGAAGACTATCTGAGAGAAATTCTGTTGCCACCAGTTATA |
| | | | CTTGACAATTTAGTTGAAGCTCAGAAAGTTATATTCATCCCTCT |
| | | | TAGCTGTAGTCTATATTAGGGCAGTTCTCTAGAACGCCCACAT |
| | | | TTCCACCAACTCAGTAAACTTGAGGGGAGCTGGTTGGCACCT |
| | | | CGTGAAGAACTCTTTCCCTGTCGTTTGCAGTAACAAACTCCAG |
| | | | TCTGTTGCAGTAACAAACTCCAGTCTGTTGCAGTAACAAACTC |
| | | | TAGAATATTGACATTCTCTGTGGGGGAAAAGCAGTGTCCACTG |
| | | | GACCCCTTCTGGTACTGGATGTGTTCTTTACAAAGGCTAGCTC |
| | | | AGTCCAACACTGTGTTTACATACACTCGTGCTTTTCCTTATCTG |
| | | | ACTTCTCATTTTGTATCAGAGGCATATCATAAATTGATAATTTTG |
| | | | CAAAATGCACTTTTTTGAGATGCAGATATAGCAAAGGATTAGTA |
| | | | ATATAGCCTGAAAACAAATGGGAGCATAGCAGTGTGTGAGGTT |
| | | | CTCGAGAACTGTCTTGTCTCTGTGTGTTTATTTGCCTGCCAGT |
| | | | GCTCTCCAGCGCCATCCTGCCCTGGACACCACCCTGACGTGA |
| | | | TGCCTCTATTGCAGCTCAGAGGCTTTATTTTTTCCATTTTGACA |
| | | | TTGGCACTAAATGCATTTGGGGATGGTTAAAACAAATTACTATA |
| | | | GAACATTTAAATGATCAGTTTAAGGGGAAATAGGCTAGTTTATA |
| | | | GAAAAATAAGAGCTAGTGGCTTATAATGGTGACAGGTTCTCAT |
| | | | GTGGCACCCCTAGGACCTGTGCAGACAGTAGTCTGTTGAATC |
| | | | ATTACATCAAGGAGCTGCCCCTGTCAGGGTGAGTGTAATTAG |
| | | | GAACGATACCAGCACATAAGGCTCCCCCCAATCTCTTCCAGTT |
| | | | GCTTTTTCTTTTTTCTTTTTTTTTTAGACAGGTCTTACTCTGTCA |
| | | | CCCAGGCTGTAGTGCAGTGGCATAATCTCAGCTCACTGCAGT |
| | | | CTCTGCCTCCCGGGTTCGAGCGATTCTCCTGCCTCAGCCTCC |
| | | | CGAGTAGCTGGGACTACAGGCACCCACCATCATGCTTGGCTA |
| | | | ATTTTTGTATTTTTAGTAGAGATGGGGTTTCACCATGTTGGCCA |
| | | | GGCTGGCCTCGAACTCCTGACCTCAGGTGATCTGCCCACCTC |
| | | | GGCTTCCTAAAGTGCTGGGATTGCAGGCGTGAGCCACCACGC |
| | | | CCGGCCTCCAGTTGCTTTTGAAGAGGGTAAAGTCAAGTTTCTA |
| | | | TTTCTAGAAAACATTTTTTAGAAATTTGTTGCGATGTTTGTACAA |
| | | | TTTACCTCATAAGAGAACCACACCCTTCTCCAAAAGTGCTGGT |
| | | | ACTGCATCAGTGAGATGAGTAGGGTTTTTGTTTGGGATTGTAA |
| | | | GACTATTAAGATCCTAGTAAGTCAGTGGTAGTTTACTGTGATGT |
| | | | GAGCATTGTAGATTCCCCCGTTGTCACTAATCACACAACAATTT |
| | | | TGAGAAGTAGGCTATAAAACAAAAAAAGGTTGCTGTTTTCTATT |
| | | | TTTAAATAAACCAAAAAAAAACAGAAAAGATGTGAATTTTCCCC |
| | | | AGTTATGTGGGAAAGGTAAAGCAACACCAAATAAAAGCCCACA |
| | | | GCAGCTTCATCTTTACGATAACTCAGTGCATATGTGAAAGAGA |
| | | | ATGATGCATTAACTGAAATACCTCATTGAATATTATACTACTAC |
| | | | TGGTAAAATGCAGAAGACAGTGTTAATGTGTTTGGTTTGGGGA |
| | | | CTGGTTGTTATAAAATGCAATTTTTTTTTAAATCTAAGCATTTCA |
| | | | TTATGTGTTCTACAGTGTCGGTGAATAAATGAAACCAATCTCAA |
| | | | TTTAGAGGTATGGATGATGACAGAAAGCCCAATAGAAGCTTAA |
| | | | TGATGCTTCTGTTTGAGGCCCAGCAAGCACCACTAAATTACTG |
| | | | GATGAAATGAAATTGTTCACTTGAGGGATTAGTCAACCATCTG |
| | | | GGGGAGAAGTTGCTCACTGTCAAATACAGCATGCACGGTCCT |
| | | | AGCTGATAGACCTTTTCCTCATTGCTACAGCAAGCCACAGGGT |
| | | | AGAGTGACCAGTTCTCCTATCCAAAAATAAATGCGAACATGCA |
| | | | TACATAAATGTGGCTGAGGGCCACTTTTGCCATCACTGTGC |
| 104 | LPGAT1 | 2454489 | GTACAACATCATTCAGTATTTTTACCATTGCCTGTTTT |
| 105 | LPGAT1 | 2454490 | GACCCTCAGCAACTTGTGGATATTTCTCATACAGTCTTTTGCAT |
| | | | TTTTGTCAGGCTATATGTG |
| 106 | LPGAT1 | 2454491 | TTCCAATTAAAGATGTACCCCTGGAGACTGATGACCTTACCAC |
| | | | TTGGCTCTATCAG |
| 107 | LPGAT1 | 2454492 | CTAATGGACCTGAACTCTTGAAAGATAAAGACTAAAGCAAACA |
| | | | CAAGAAGGTGACATGGAGGACCAGACTATACAGGGCAAGGTC |
| | | | TGCTTCTAGAATTCCTAATAGTACATGGGGGTTCATTAACCTTT |
| | | | TTCTCTCCTCTTGTGAATGTTTAAAAATTTCCATTATAATTTAAA |
| | | | AAACTTATTATAAACATAAGATATTGTAGCAATAATACAATAATA |
| | | | GCATACTATAAAAAAGACTGAGAACAATAGGAGCTCTTTA |
| 108 | LPGAT1 | 2454493 | CAAGGTCACGCAACTGGCAAGTGGTAGAGTCAGGATTCAACC |
| | | | CCAGGCAGTCTGCCCAATAGCTTTTTTTTTTTTTGAGACAGAAT |
| | | | TTTACTCTTGTTGCCCAGGCTGGAGTACAGTGGTACGATCTCG |
| | | | GCTCACTGCAACCTCCGCCTTCCAGTTTCAAGCTATTCTGCCT |
| | | | CAGCCTCCCGAGTAGCTAGGATTACAGGCACCTGCCACCACA |
| | | | TCTGGCTAATTTTTGTATTTTTAGTAGAGACGAGGTTTCACCAT |
| | | | GTTGGCCAGGCTGGTCTCGAGCTCCTGACCTCGTGATCTGCC |
| | | | CACCTCAGCCTCCCAAAGTCCTGGGATTACAGGTGTGAGCCA |
| | | | CCGCACCTGGCGTGATAGTTTGTATGCTTAATCACTAGGCCAC |
| | | | ACTG |
| 109 | LPGAT1 | 2454494 | GAGGAGATGTAAGCCTAGCATTATATG |
| 110 | LPGAT1 | 2454495 | GGCCCTAATTGGTTATGAGCCCATTGCTACACCCCAATACTTG |
| | | | TCATGAAGAGAATGATATATGATGACAGGTCTGACATGGGTTT |
| | | | TTAATGAGAAGGGTGCCAAGACTACCAGAATTGGCTGAGTGAT |
| | | | AATAGATTGGCAGACATTTGCTTGGGATAAATTTATTTTGTTTT |
| | | | TTAAAGAAAAGCTAGATAATCCTTTCCCTTGGTGAGAGGATTC |
| | | | CTGC |
| 111 | LPGAT1 | 2454496 | TGTTTGTCAGCTCACATTTTGGAGTCTTGACGTAAAAATTCAAA |
| | | | TGCTCCAACTCCAGTATAGGGGGTGCCAGCTGCTAAGTATTAT |
| | | | TTTACATTTTTTTTGAAAGTGTAATTTCATCTAGTGCTTTTAAAT |
| | | | CTGACTATGGATTTTGGTAGTATATTCTCTATTTAAGAGCACAT |
| | | | TCTGAATTACTGATAATAAGAATGTTCATTTCTTGAAAATTAGG |
| | | | AGCTAGTTTTTCATTTGGGTAGCTATTGGTATTGTAAAGGTTTA |
| | | | TTTCTGGTGTATATGTATTTACTTATTTAAATCCCACAAGCACT |
| | | | CCTCTGATTTGATTTCAAGAGGACTGGTATTCAATGTATTTAAT |
| | | | CCTTTGCCATATTAGGGGATTAGTCATTTTAATATTTTAATCCTA |
| | | | TGGTGACCAATCAGAGTAATA |
| 112 | LPGAT1 | 2454497 | GCCTTTTAGCCTTACTATGTTTCCATGTGAAAGACCTCAACCC |
| | | | GTGGCAACTACCAAGGACA |
| 113 | LPGAT1 | 2454498 | ACAGCAAATCAAAAGGCCTCCAGTGGATAATAGATACAACGAT |
| | | | AGCTTATCCCAAAGCTGAACCTATAGATATTCA |
| 114 | LPGAT1 | 2454499 | CAGAGATCGAAAATGGATTGTTTTGTTTCCAGAAGGGGGCTTC |
| | | | CTCAGGAAGAGGCGAGAAACAAGTCAGGCATTTGCCAAGAAA |
| | | | AATAACTTGCCATTTCTTACAAATGTTACTCTGCCAAGGTCTGG |
| | | | GGCAACAAAA |
| 115 | LPGAT1 | 2454500 | TCTTGAGAACTTAATAGCTATCTTAATCATAATCAGTTCACTTC |
| | | | AGCAAACTGACTAACAAAATGTCTTACATGTTTTGCATTTGGGA |
| | | | TACATTTGATCTAAAGACTGAAAGCATACTAATTATTTTGAGGA |
| | | | GTTTCTGTAATTTTGTTGGCTG |
| 116 | LPGAT1 | 2454501 | GAGAAGGCAGCGGAACCAACAATTAGAAAGCTTAGCAGTCTC |
| | | | AGGGATCCGAAAAGCTAGCTGAGCACCTTACCTCATTTCCAGC |
| | | | TTTAGGAAATAATTGAATTTACAGTGTAGTGTAACAGTTGATTC |
| | | | TAATGATGATCATCAGGCATCAAGAAGAGGGGC |
| 117 | LPGAT1 | 2454502 | GATGTGGTTGATGGATCATATTTTT |
| 118 | LPGAT1 | 2454503 | TTCTCTATGCTGATAGGCAGTCTGCACTAAGTTGAGCATAAAT |
| | | | ATGGTGACCTCCTGGGAGCAGTGAACAACTAGGTCACACAAG |
| | | | AAGGGTGAACC |
| 119 | LPGAT1 | 2454504 | CGAGGCCATCCAGGACAACAGGGTGAA |
| 120 | LPGAT1 | 2454505 | GCAACAGGAGATGTGTGCACACTGAT |
| 121 | LPGAT1 | 2454506 | ACACAGTAGGCATAGGGCTCTTTTAGTTACTAGTGATTCCAAA |
| | | | AGTGACTTTAATCCCATTACTCAGGATCTCTATGGTACTGTCAA |
| | | | TTAGATCTTCCTCATTTTTGCAACATGTTTACGTAGCATTAATG |
| | | | ATATTATTGTTTCATAAGTGAGAAAATGAAGACACAGAAGGATA |
| | | | AAATAGTTTGTTGCATCAGCTTGCGGGCATAATAAGCAACCTT |
| | | | TCTTCTCTCTGTTAATTCTGTTTTGTAGGCCAGTATAATGGCTT |
| | | | TAGTGTCACTGTTGTTAAGGAGTTTTTGATGGGTTGTTTCTATT |
| | | | TTCTTTTTGAGATGTGAACTGTCCAGATTAATTCTAATCTATAA |
| | | | CTTTTGGGAAAAGTATATTGATATACATGTTAGAATGTGTGTGT |
| | | | GTATGTGTGTGTGTTGTGTGTATGTAGTAGATGATAACCTTTAG |
| | | | CTTTGGTTTTCAATAAGAATTTTAAAATTTATTACAATTAGAAAA |
| | | | TTTTTCCTCCAGTTTTTATTCAGTTGTCCTTTTTCCCTTTGGAAA |
| | | | TAGTGGACCTGACCCAATTCTTTTTTGAGAATTCATTTCATAGA |
| | | | GCAGCGTGTTAGAATATTTTTGTTCTTCTAATCAAGTGCAGTGT |
| | | | AAGAACTGTAGACATCCATAATTTCTTTTCTATCCCTTGGTTAA |
| | | | GATATTAGCTTTATTACTATATTTACTGGTCCTGGAATAGCAAG |
| | | | GCATAATCTGAGGAGCATAGCTACTTCATCTGTGTAATAAATT |
| | | | GCTCTTTCACTACAAACATTTTAATACTGATTTTGTTGGTCATTT |
| | | | AACTTTCTAATAGTGGTCCTTAAATTATGCTCTAAAAGAAGAAT |
| | | | ACCATATATATTGGAAATTAAATTTGTTGTTGAATAAAATTAGAA |
| | | | TTATTATAAAATTCAACACGACCTTATTGCTACCTCAGGA |
| 122 | LPGAT1 | 2454507 | CCTACTTCCTAACTATGTAAGTTTGAAAACAGTGCTTAACCTTT |
| | | | TGTGCCTCATTTTCCTCATTTGCATATTGGGGATGATACTATCT |
| | | | GCATATTTGGAATTTTGTGAAGATTAAATCAGAAAATAATGTAA |
| | | | ATTATTTTCTATTACTAAGTACTAGTGCATGGCACATAATAAAC |
| | | | ATTCCATAAATGTTAGCTATTAAGATTATTATTTATATATCTATTT |
| | | | AATAATATCTGCTACTATTATTATTTTAGTTATGTAACCCCTCCA |
| | | | AAAGCTACCTCTTGAGCCTTGCTTTCTCAAATTTTAACCTCTTA |
| | | | AAATTTAAGAGTCAAAGGGACACTGACCATGATTTCCTAGTGT |
| | | | GTACAATG |
| 123 | LPGAT1 | 2454508 | CCTTGTTTCAAGCTGGAAGTGGGGATAACATAGAGCCCTTCAC |
| | | | ACATCTGCTTTTCTCATCCCCTTCAACTGTCTGTTCTTGTTTTA |
| | | | AGAGTGAGAGATTAAAATGTTGATTTGTAGCCAAGCAAGTGGC |
| | | | TGTGGCTTATCAACATTGAGCCTCACTGTAGGGTAATCTTATT |
| | | | GGAATATTTCACTGGGGAACCCCAAATGTCAGTATTTTTAGGT |
| | | | CTTTCCTCTTGAGGTGATCAAATTCCCTA |
| 124 | LPGAT1 | 2454509 | GGTGAAGTGTCCAAGTCTTTTCTTAATTTTTTTAATTGGGTAGT |
| | | | TTGTTCTCTTAATGCTGAGTTTTGAGAGGTTTTTTTTTTTTTTTT |
| | | | GAGACGGAGTTTCGCCCTTGTTGCGCAGACTGGAGTGCAATG |
| | | | GCGTGATCTCAGCTCACTGCAATTTCCACAACCCTGCCCGGG |
| | | | TTCAAGTGATTCTCCTGCCTCAGCCTCCTGAGTAGCTGGGATT |
| | | | ACAGGCATGTGCCACCACACCCGGCTAATTTTGTATTTTTAGT |
| | | | AGAGACGGGGTTTCTCCATGTTGGTCAGGCTGGTCTCGAACT |
| | | | CCCGACCTCAAGTGATCTGCCTGCCTTGGCCTCCCAAAGTGC |
| | | | TGGGATTACAGGCGTGAGTTTTCTATATACTTGGGATATAAAC |
| | | | CCTTTGTTGGATATGTGATTGCATATTATTTTCTCTCATTTTATT |
| | | | CTCTTAACAGTGTCTTTTCCTCATTAAAATGTTTACATTTTGATA |
| | | | AAGTCTAATTTATTGATTTTTTTAAAAAAATTGGGCAGCCCCCA |
| | | | AGCCAGAATAGGTTGAGAGAGACTCCCCAGTTCATTGATGTTA |
| | | | TTTTCTTTTATGGCTTGTGTTTTTCATGTCATGTCTAAGAGTACT |
| | | | TTGCCCA |
| 125 | LPGAT1 | 2454510 | GGTCTGATTTGTTACCTGATGCTCACAGAGTACT |
| 126 | LPGAT1 | 2454511 | TTTCTTTAGTAGGAAGTGCTGTACAGATATCTCACGTTGAGGA |
| | | | AATGCTTTATATTGCCTTTGTCTTAATATTTCAAGGGCAAACCA |
| | | | AAAGAGATACTAGCTTAACTAATGATCCACTTCTGCATGCTTTA |
| | | | TTTGGATCTAGGATAAATCAGTACCCCACCCCCCGGAGTTTAA |
| | | | GTGATGATTGGTA |
| 127 | LPGAT1 | 2454512 | CATTTTATCCACACACGCAAGAGAAG |
| 128 | LPGAT1 | 2454513 | GTAAGAGTGAGAACACTTTTCTTTAA |
| 129 | LPGAT1 | 2454514 | AGGTTTGCCTTCATGGTCGTCAACAACCTGGTTGCTATTCCAT |
| | | | CCTACATCTGCTATGTAATTATACTTCAGCCCCTTCGAGTGCT |
| | | | GGACAGTAAGCGGTTCTGGTATATCGAAGGAATCATGTATAAA |
| | | | TGGCTTTTAGGAATGGTAGCTTCCTGGGGATGGTATGCTGGAT |
| | | | ATAC |
| 130 | LPGAT1 | 2454515 | CCTTGCCCTCTGGTCGGAAATCTCATTCTCTTCATCCCCAGTT |
| | | | CCTTGGCTTTTACCTCTTTCTGGCTTTTGCTCCCTTCCCCCTAC |
| | | | TCCTGTCCTTCCTCTTTTTCGCATTATAACCCCCTACTTTCTTC |
| | | | CTCTCACCTTGTAAGCTTTTTTTCTAGGCCCCCCATTTTTTTTC |
| | | | TTAAAAAAAAAAGGGAAACAAAAACCCTATTGCTACAAATGAG |
| | | | AATTTTGAGGGTAACTCTTCGCTAGAGCCAGAGACCTTTTAAA |
| | | | GGAATGCATCGGTGTGCAGGAATCGTGGTGGTGAGGAGACTG |
| | | | AGGTCCTCAGTATCTGGGAAATCTTATTGAGGGGACCCTGTTT |
| | | | CGGTCATGTCACTTGTGTCTTCAGTTTGGAGATCCTGAGGTTG |
| | | | TCTGAAGCGAGTGGATCTATTTTTCTAAGTCCAATAGACGACC |
| | | | GCAGTGAGACACGGTGCGGGGACGGCCACCGATTACTGAAT |
| | | | GGGAATTGTGTTATCATTTGCTAAATATATTGTGACATACTTCG |
| | | | TGCCTCGGTGAACAGCTC |
| 131 | LPGAT1 | 2454516 | CAGCCGCGAGGGGAGTAGGGCGCCAGCGCGCCCGCTCGCG |
| | | | CAGCGCCTCGGGCCGCTTGGGCCGCCACCGCGTCCATGACC |
| | | | GCGACCCCTCGGCGGG |
| 132 | LPGAT1 | 2454517 | CCTTGGGGACCGAGTCTCGGCGCCGCCGGGGAACGGGCGC |
| | | | GGGCCGCGCCACAGCCGGAGCGGGGCAGGGCCCCGCCACC |
| | | | GCCTTCTTCCGCCGGCCCCGCCGCCGGCCATGCATTCTTCCG |
| | | | GCTCCTCT |
| 133 | LPGAT1 | 2454524 | TGAGGCCAGTAAGCCCAAGAACTTAAATGAACATTCTTATACT |
| | | | TTAGTTTGCATTCTCAGAGCTGGGGAACTGTCTGTAGGCACAG |
| | | | AAGATGGAAAAGGGATTTTCTGGTCTGTTTCTGACTTTAAGTTA |
| | | | CACATTTTAAAAAGTACTCTGAAGACACTGGGGTTTGTTCATCC |
| | | | CCGGCTTGCTACTAAAGTAGTAATG |
| 134 | LPGAT1 | 2454525 | TGCCAAAGGAATTCTGCTCAGCAGATTAAGTATGTTCATGTTTT |
| | | | AGAATAAAAATTGCCAAAACTTTGTTGAGAAACCACTTATGAG |
| | | | GAAACCTTAAATACTAATTAGGAAGCTAAAAATTGAATATTGGT |
| | | | ATATTGGTATAGAATGAATATATATATATATATATATCTTTTTCC |
| | | | AAATTATGACATTCCGTGTAATATGAGTGAATTACTCAGCTCTG |
| | | | CTGATGAGGACTTATGTTG |
| 135 | ERO1LB | 2462330 | CTATGCAATCCTCGAACTCAGTGTGCTTTTCCCTGACAGGATA |
| | | | TATAAAAAGGTAGATTAGGTCAACCCTCCTTTAAGCTTACTCTC |
| | | | CCCTCACCTTTTCTTTTCACTGTATATAAACGGTACTTTCTGTG |
| | | | ATTCATACCAACAGAGGACTTTCTGTGATTCATACCAACAGTC |
| | | | CTAAACTGTCATTTTCTAAATCTGGGATTTAAAATCTTTAGACA |
| | | | ATATTTAAAATCTTGATTTTTTTTAAATGTCAGCAGATACAATTT |
| | | | GGAAGATTGCATCTGTGTAGAAGTAATGCAGGTACAAGATCTA |
| | | | GAGTTTTTCCTTAGACTCTTTAGTCTTTTCTGAATTAAAGAATAA |
| | | | GTGCTCTTAAATCCATATTTTATCCTGTCAAAGTCTGAAATGTG |
| | | | TTCATTGATGATTTGGTGACATCTAAAAAATTGTATTTAGTTGG |
| | | | CTTGGCTCACCCCTCTTAAAAATACTTAGCCATCTCTTGGTGG |
| | | | GATGTGGTGGGGGTATTAAGGTCTCAGAGTTATTTATTTTCTC |
| | | | ACCTAATTTCAAACCTTTATAAACTTGGGGTTTTGTTGTTGATG |
| | | | GTGGTAGTATTTTTTGTTAAGTTGTTTAAAAGGCTGACTTGATT |
| | | | GGAGCCTCCTCTACTTTTTCTTGAGGGTTGCAAGTATTGTATG |
| | | | GTGGGGGAGGGGGGCCTTAAGGCAAACTGTCTAAAAAGTGAC |
| | | | TATCCAATTAATTTAACTAGTAAATTAGTAAGAATTATTCTTAGT |
| | | | ATTCACTCAGAGTTTAAGATGTGAAAAATCTGCACTTTGTTTAT |
| | | | CACTCTAAATGTAAAGAACTTTTTGATAGTGTTATTTCACCACT |
| | | | CCCTCAGTTAAAGGCTATTATTTAAACTGTTTACTGGAGAAAAT |
| | | | CCTCGCTCATGTCCATTTATTGTTTTTTTCTGTACTGTGATTTGT |
| | | | TTCAAGCTTAGGAAAACTAGTATATTAGAGTATGTTCTAGGAAA |
| | | | TTAAAAGATCTGGTTAGAGTAAAAAGTTCTTTTTAAGGTTCTTA |
| | | | ACTAATTTTTTCACAACTAAGAAAATAAATGAAGTATTCTTAGG |
| | | | CTGAAATTCATCTTATTTTATCATAAATTAGATTGTAGGGGCAG |
| | | | CCTACATTTTTGTGTATGTGTTTTTATTTCTTAAATGATTGTGTG |
| | | | AGCCTGGTGACATTTTATGGTTCTTGTGATCTAAACTGTTTTTC |
| | | | CAATTCACATCTTTTGTCGTGAAGTGATATTATACTAGAGTACT |
| | | | GTTTGCATTGTAAAAATGCTTTGCTGGTGCTCTGGCATTTTGTC |
| | | | TTTATCTCATCACCTAATTTAAAAACCCAGCACTTGATAATATA |
| | | | ACTGACAGAAATGATTGTACCCACTGATGAAGTAATGAAAATG |
| | | | AAGAAAAGGAAAATATTCCTTCCTTCAATGGCGTAAGTTTATTT |
| | | | TTTACTTAAGTGGCATCTATGTAAGTTAGACAAACTATATATTA |
| | | | AAATTGGTAAACTTTGAATGTTTCTCCTGTTTTGATTCTTAGATT |
| | | | ATGAGGAGGATCAGACAGAATAAGACTCCACACTTTTGAAATT |
| | | | TGATAAGTCAAAACGTTTTATTTTGACATTTTTAACATTGTGAAT |
| | | | TATTCGATATTTGTAATCTCTGTATGTATATGAAACTCTGCCAT |
| | | | GTTTTTCAACTTTGCCTATGTGCCACTGTA |
| 136 | ERO1LB | 2462331 | CTAGGGAACAAATGTTGCTCAGGGCTGGTGTCAGTGAGAAAA |
| | | | ATTTATCAATGCTTTTTAATGTGTTTTTACCCTTGCCTCACTGTG |
| | | | TGTGTGTCACTTTCTATAATATAAAGAAATACTATAATATTTCTA |
| | | | GAATCTGGAACTGTCACCATGATGAATGGCCCTTTCAATGCAT |
| | | | AGTTACAGAAATTCCTGAAGATTCCCCAGGACTTCAATTTCATT |
| | | | GGTTTTTATTTGCAGTTTTTAGTTGCTGTAATTGTTGCTGTTTC |
| | | | CAGTCTAAAGGACCTC |
| 137 | ERO1LB | 2462332 | AGAGACATAAAGTGACTGTGGAAAGCCTTTTAATTATGGACAT |
| | | | TCATCAGAAAGACACTAATCTGACTTCAAGAATTCTGAACTATT |
| | | | AA |
| 138 | ERO1LB | 2462333 | TTTAAAGTCTTATTACAACACAGTA |
| 139 | ERO1LB | 2462334 | GTACTAACTTAGAGAGGCCTTAATGCTGACAAGTCAGTTTCTC |
| | | | TACAGGTCATAGGAAAAACTAAGTTTCCAATTGCCAGTGTTTTT |
| | | | CAGTTTGCTGCCTTAATTTTGTAAGGGAGATATTCTTCTAATAT |
| | | | TCTTTTTGCTTGGCTATAACTTGTTCAACTACAATAGCAGGAGT |
| | | | AAGGAATGTGTGATTGAGAAGGTGATAAAAGAAAATTAAAACC |
| | | | TTCATCTGCTCCTTATTTTTCTTAAATTTTCATTACTATTTTTTTC |
| | | | TTTTCTCACCTTTTTCCTGCACTATGCTCTTTATTTCTGAAGCTC |
| | | | AGAGGTCATTTTTCTTTCACTCATTTCTACATGATTTACTTCTGT |
| | | | ATAGAGACATATAATTTGCTTGCTTGTTTATATCACCAGTGG |
| 140 | ERO1LB | 2462335 | AGGAACTGCCCTGAAGATATTATTCTCTGAAAAAGAAATCCAA |
| | | | AAGCTTCCAGAGAATAGTCCATCTAAAGGCTTCCAACTCACCC |
| | | | GACAGGAAATAGTTGCTCT |
| 141 | ERO1LB | 2462336 | TGTGTCTATGTTTCTATTGATACAATACCAGATTCATTTGTGAA |
| | | | GTTGGTGGTCATTACGAACCGAGTATATCCGTATTTTACATATG |
| 142 | ERO1LB | 2462337 | ACATTTCAAGAATATCTCCCGTATAATGGACTGTGTTG |
| 143 | ERO1LB | 2462338 | GTCCTTTCCCATGCACTTTGATGAGAAATCCATGTTTGCAGGT |
| | | | GACAAAAAAGGGGCCAAG |
| 144 | ERO1LB | 2462339 | TTTATACTTGATTGAGCTTCGAGCTTTGTCAAAGGTGGCTCCAT |
| | | | ATTTTGAGCGCTCAATTGTCGATCTTTACACTGGAAATGCAGA |
| | | | AGAAGATGCTGACACAAAAACTCTTCTAC |
| 145 | ERO1LB | 2462340 | GGAGAAAAGAGTCTTCTATAAGCTTATATCGGGACTTCATGCT |
| | | | AGCATCAATTTACATCTATGCGCAAATTATCTTTTGG |
| 146 | ERO1LB | 2462341 | TGTCATATACTTTTAGGGAGGAAGCTACAAAATAAAATTCAATT |
| | | | TCTTTTGGTCCCCATCCATGACAATTTGAATATTCTAGCAAGAA |
| | | | TTCCCAATTAGGGAACGAGAACTCAAAAGAATTATTTTTTCTAG |
| | | | TTAGAGGCCACGTGCTTC |
| 147 | ERO1LB | 2462342 | AGCATATTTTTGTAAGGTCTAGGATTT |
| 148 | ERO1LB | 2462343 | GAGAATCATTCTACACATGGCTAGAAG |
| 149 | ERO1LB | 2462344 | AGAGGCCATATTTTTTAGTACGTTGGGTACTAGACTTTTCCTGT |
| | | | TGGCACTTGAGGTGTTTTGAATCACAAGTGATATAATGATAAAT |
| | | | GATCCTTACTATATGTTGAATGAATTAATTTGTTAGACGTTTTCA |
| | | | TTTTTGTACAAAGTATGAAGACTCTCAGGAGGCAAAGTAATTC |
| | | | CCCACCGTCTAGTTTATCCCTAGACTCCTTACTCAGCTCATCT |
| | | | GAGTGTTCGGTTTTTC |
| 150 | ERO1LB | 2462345 | TTTGTTTGTTTCAAGTGTGGAGGAAATTTTTTGTAACAATCAGA |
| | | | ATTTGATTTTTCCTTTATGGAATTCAAAAGAAAGTATTCCTG |
| 151 | ERO1LB | 2462346 | CCTGGCCAAAATGTGCAAATCTTATACTCTTTGACCTGTATTCT |
| | | | GATTAAGAGGACTCATTTGCAGGGCGTCTACTCAGTGACCAA |
| | | | GGTTTGTGATATAATTAATAGTTTAACAGTTTTAATCTCAAAAAA |
| | | | TAGTATTGGGATCTGAGCTATGTAAGACATTT |
| 152 | ERO1LB | 2462347 | GCCTCGATCTGTTTATCGTCCTTTAAATCCTCTGGCGCCTAGC |
| | | | CGA |
| 153 | ERO1LB | 2462348 | AAGAAGGAACGACTGATAGAGGGTCGGGAGAGGCCGGGTGC |
| | | | TGTGGCTCACGCCTGTAATCCCAGCACTTTGGGAGGCCAAGG |
| | | | TGGGTGGATCATCTGAGGTCAGGAGTTCAAGACCAGCCTGGC |
| | | | CAACATGGTGAAACCCCGTGTCAACTAAAAATACAAAAAAATT |
| | | | AGCCGGGCATGATGGCAGGTGCCTGTAATCCCAGCTACTTGG |
| | | | GAGGCTGAGGCAGGAGAATCACTTGAACCCGGGAGGCAGAG |
| | | | GTTACAATGAGCAGAGATTGCGCCACTGTACTCCAGCCTGGG |
| | | | TGACTAAGTGAAACTCTGTCTCAAAAAAAAAAGAGGGTGGGGA |
| | | | GGGGAGTATTTGTTTCTATTGGAATAAAATTATACACTATAAAA |
| | | | GTTAAAACATTCTATGTTTGGGTATTATGCTTTCTTT |
| 154 | ERO1LB | 2462349 | GCTGCTCAGTATGTAGACCTATTGCTGAACCCAGAGCGTTACA |
| | | | CTGGCTATAAAGGGACCTCTGCATGGAGAGTGTGGAACAGCA |
| | | | TCTATGAA |
| 155 | ERO1LB | 2462350 | CCTGCACAACAAAGTAAGACCACTTTTCTTAAAAAAGAACAAT |
| | | | GAAAAACCTGATATAATTGATTTTCCTCTTGTGATTTTTTAGCTC |
| | | | CCTTAAAGTATATTTTAAATCATCATGGTTTAATATCTGAATCAT |
| | | | GGTTTTTCTTCTTTATTGGTTATTTGGTTGGTTTTCTTGGGAAA |
| | | | AGAGGTTGGTACTAGTCCAATTTGCACGTTTGTAGAGGATTCT |
| | | | A |
| 156 | ERO1LB | 2462351 | CTGGGGAGGACTCTAATTCGACTTCTCCACAGCCCTTTTTCCA |
| 157 | ERO1LB | 2462352 | CAAAGAAGCTTTCATTGACTGGGCAAGATATGATGATTCACGG |
| | | | GATCACTTTTGTGAACT |
| 158 | ERO1LB | 2462353 | TGCTACTAGTAGTGTATCAGTTATCTGTTCTACAACTTCTCCAG |
| | | | TGATTGGTACTATGATTTTTAAACAGCTTTACTTTGAGGTATAA |
| | | | TGAAATATGATACACTGCATATAAAGTATACAGTTTGATGTTTT |
| | | | GACATGTGTCCACCCATATAACATCATCACAATTAAGATACCAT |
| | | | AGGTTGGGTG |
| 159 | ERO1LB | 2462354 | ATGATCTAGGGACTAGGCTTAAGTCATTGGAAGATTTTGGGGT |
| | | | AAATTGCCAGTTTATATTCTTTGTCATTTTTTTCTCCATTGGGTT |
| | | | GGATTTTAAAATTATTACTGATTTGTAAGCATTCTTTATATAATG |
| | | | TGATAATTCTTTGTTGGCTGTGTTGTTAGGATTTGTCCTTTAAT |
| | | | TTTGCATATAGTTTTTTGTTGTTGAACAGAAATTATTCTTTAAAC |
| | | | TTAAAAAATTTAAGTATAATACACATATGGTGGAATAGAAAATT |
| | | | CTTAAGTGTAAAGGTCAATGTAACTTTACAAAGTGAACCCAACT |
| | | | CTATAGCCACCATCCAGAGCATTATACTTGCTGTCCAGATTAC |
| | | | CATGTGTACTTTCCTAGTCATTATCACCTTCCAAAGTTAACCGT |
| | | | GATTTTGAGATACTGACAGAGATTAGTTTTAACTGTTTATAAAT |
| | | | AGAATGATATAGAACATATTCTGTTGTATCTGGCTTCTTTTTGT |
| | | | TAACATGTGTCTGAGATTCATTCATGTTTTTGGGCATAGTAATG |
| | | | TTTAATTCTTTTTTATTGGCACATAGTATTCTATAGTAAGAATGT |
| | | | GCCATGTTTCCATTCTGCTCTTGATAGCTTATGCTTTGGGGCC |
| | | | ATTTC |
| 160 | ERO1LB | 2462355 | GAGCAAGCTAATAAACTGGGAGCAAT |
| 161 | ERO1LB | 2462356 | TTCCGGTTGGAATAAAAGCTGGGCATTCTAATAAG |
| 162 | ERO1LB | 2462357 | ATGTTCCAGCTACATGCACTTCTCCCATTGGTAAACCCTAGATT |
| | | | AGATTGGTAAACTCTAGGTTAATCGTGTGGGCCAAAAAAAGCT |
| | | | TTCTAGTAATCCAAAATTGCCTACACTTTGTTAGAGCAGAAG |
| 163 | ERO1LB | 2462358 | TAATCTGAAGCGACCTTGTCCTTTCTGGGCAGAAGATGGCCAC |
| | | | TGTTCAATAAAAGACTGTCATGTGGAGCCCTGTCCA |
| 164 | ERO1LB | 2462359 | GGTTGCATACTGAGCACTACTTTAGCAAGCCTGGCCAGGAAT |
| | | | GGTCTCTCTGCTTAGGTGTGATATGTGAGAGAGACTTGAATGC |
| | | | GGCGAAAGAGTGAGCCGTCATAAGATCTGGAGGA |
| 165 | ERO1LB | 2462360 | ATGAGAAGTGCTGTCCCTTCCATTCGTGGTGGCAG |
| 166 | ERO1LB | 2462361 | GCAGCCTCAGTGGAAACCTCAGGTAAGCCTGTGGGGAATTCT |
| | | | TAAGATGGAATAACCCTTCCGAGTTAGTCGTCCCCATTTGGCA |
| | | | CGAGAGGTATAGGCCTTTATATCTCTCCATCAGTTGGTCATTG |
| | | | GATGAAGGCCACCAGAGGAAATAAGGATCCAATCTTGGGTAA |
| | | | GGTGGTTCTTTTCACCCAAGCTTGTCTACCTGCAGCATTTCCA |
| | | | CAACTGAGGTAATTACATCCCCTTTATTCCTGAAGGGTGATCT |
| | | | GAGTAGTATGTTACAGTGTCTACCACAGTCCACTCGTTGCACC |
| | | | ATGTATTTC |
| 167 | ERO1LB | 2462362 | TCCTACCTAATGTGAAAGAGCCATGAGAAGGTTTGGGGAAAG |
| | | | AACATGCCAGGGAAAAGATGTAGAATACCAAGTAAATGGTCTT |
| | | | GAGATAGAAATAAGCTTGGTGTGTTGAATAGGCAGAAAGCTG |
| | | | GTATAGCTGGAGTGAACGAGAGGGAGAGTTGGAAATATAGGT |
| | | | AGGCACCAGATTTAAAAAACAGTAGGACCGTATTGACCATGTA |
| | | | AGGATGCTGGATTTTATTTTAAGCAGGATAAGAAACTACTGAA |
| | | | GGGATTTTTGTGCAAAAAAGACTGTAAGGGTAGAAGACAAGAA |
| | | | ATAGAGGAACCATTTAGGAGACTCTTGTGTTAGTTCAGATAAA |
| | | | AACAATACAGATTTGCAATAGAATGCTGCAGCTGAAAAATGTA |
| | | | GAAAATGATCAAATTAGGGTTGTACACAAAAGGCAACACCAGC |
| | | | AAGCTTTTCTGATGAATTGAGTGTGACGTATGATATAGAAATGA |
| | | | AATCAAGGATGATGCCTAAGTTTTGAGTGCACATATACAAGCA |
| | | | CAAATGTACATATATGTAAAATCATGACCAAATAGATTTTATTC |
| | | | CAAGAATGCAAGGATGATTCTTGCATTGATGTTGATAATCATCA |
| | | | AAATTCAATATGTGCTCCTGATTTTTAAAATAATAAGAATGATG |
| | | | TATATTTCTTAACATGATGATTTCAGTCCTAACATCAGCATAGC |
| | | | TAACACGTCTTGCATATGGGGAAACACTAGAGGAATTCTCACT |
| | | | TAGGTCAGGAACCAAGACAAGGATACCCACTATCTGCATTAAC |
| | | | TG |
| 168 | ERO1LB | 2462363 | GGAACCACTGGGATTTTGTATCAAATTAACTATTTTCCCATATT |
| | | | TTCCAAACTTTATGTAAGAGTTATATTTCTGTCCAGGTACGGTC |
| | | | ATATGACCTGTTGGACCAAAAGAAGGAAGGACACCTTGGTTGA |
| | | | CAGTCTCATTTGCATGAGTAAAAGTGGAGTCATTGTTTCCCAA |
| | | | AGGGAAATTAGGGACTGTTACAAAAGAAGGAATAATGGAACTT |
| | | | GGATAGGCAAAAGTGACAATGTGGTTCTTGGCTACTCAACAAT |
| | | | C |
| 169 | ERO1LB | 2462364 | CCGTTCCTGAAGTACTGCAATACCAGGTCGATGCGAGGAGTG |
| | | | GATGGAGCAAGCTCCTATTCCATCTCCCTACTCCAAAAATCCA |
| | | | TGTAATATATTGTTCTCGGGTAGAGGACATATCAGGTATTAACA |
| | | | GATACTTCACTTGATCTTAGCCAAAAGGCCGAGAAGCCATTGG |
| | | | AGAGACAGGTGCTTCTTTAAATTTCCACCACTAAATCTATAAAT |
| | | | CTAAGTGCATTTGTAGCTGCTTTCTCTTGTTTCTTTTCTACCAT |
| | | | AACATTGAACTATATGAAATTTTTACTTTTATATTTCAAAAATGG |
| | | | TTGAACATGCCAGTTTCATATTGCTCAATGTAATACAGTGGGG |
| | | | GAAGTGTTTCTTGTATCAAAAACCATCTCTTCACAAGTGGTCCA |
| | | | GTTCACA |
| 170 | ERO1LB | 2462365 | GTTCTGGATGATTGCTTGTGTGATATTGACAGCATCGATAACTT |
| | | | CAATACCTACAAAATCTTCCCCAAAATAAAAAAATTGCAAGAGA |
| | | | GAGACTATTTTCGTTATTACAAG |
| 171 | ERO1LB | 2462366 | CTGAGCTGTGTCTGCCAAGTGGCATCGCCAG |
| 172 | ERO1LB | 2462367 | CTGACCGTCCAGTGCGGGAAACATCTGCGAACCGCCCGCAG |
| | | | GGTGGGGGGACGGCGACACTCCGGGTAATGGCAGTCAAAAG |
| | | | AGGAAGATGGTGACGGTCCCCCTGAGCTGTTTTCGTTTTTTCC |
| | | | TCTCGGATGTGTTAAGCGGCTGGGAGTGTGGCGGGAGATGG |
| | | | GACGGGCATGAACCACCTCGGCTGTCTTGCGAAGGGAGCGA |
| | | | GCGCCCAGAGAAACGGTGACGTCCTT |
| 173 | ERO1LB | 2462368 | ATGAGCCAAGGGGTCCGCCGGGCAGGCGCTGGGCAGGGGG |
| | | | TAGCGGCCGCGGTGCAGCTGCTGGTCACCCTGAGCTTCCTGC |
| | | | GGAGCGTCGTCGAGGCGCAG |
| 174 | MIR4435- | 2492489 | TGTCAACTCTGTGTTGGAGCCAGTAGGGAGCTCTGTGGGTCC |
| | 1HG | | TCGAGCAGGAAAATCCCATGGCTTAAGCAGTGTTTCAGGAAG |
| | | | ACTGGGATGTTAGGCTCCGGAGCTCTGAGCAAGTCAGATGGG |
| | | | ACTGGGAGTCATAAGAAGGCTTGACTGTGGCTAGTGATAACC |
| | | | A |
| 175 | MIR4435- | 2492490 | GTGAGGACCTCTGATGGACCAGGAAATTGGAATTCTGCCTGG |
| | 1HG | | GAGGCAAGCCCATGGAGGCCCTGATCTGCTTGGACAGAGAGT |
| | | | AGCTCCCTTCACCTGTAAAATGAGAGTGAACGAGCTGGTG |
| 176 | MIR4435- | 2492491 | TCACAGCATTCCTGTAAAAGGTATGAGGTTCGCCCTGATTGGA |
| | 1HG | | CCAGCCGAGGTCACATGCCTACACATGAGCCAATCACAGTGG |
| | | | ATAAAGGACTG |
| 177 | MIR4435- | 2492498 | AAATTGACATTCCAGACAAGCGGTGCCTGAGCCCGTG |
| | 1HG | | |
| 178 | MIR4435- | 2492499 | TGTGAAGACTGGACTTAAACAGCTACACCACCAGAAGCCGAG |
| | 1HG | | AGAG |
| 179 | MIR4435- | 2492501 | AGATGCTAATCCAGCGTGCGTCCTGACAGAGGTTGAAGGGGG |
| | 1HG | | CTTCTCAAGTCCCAGGTCCAGCTTGGTGTGGTTCAGCTACTCA |
| | | | AGAGACATCTGCTGCTAATGGATGAGCAGTCAACCTGGACGC |
| | | | AGG |
| 180 | MIR4435- | 2492502 | CAAAAGGAAGGTGTCGGCAAGATCGTTTTTTTCTGAGAGC |
| | 1HG | | |
| 181 | MIR4435- | 2492506 | TGAAACAGGAAGCTCTATGACACACTTGATCGAAT |
| | 1HG | | |
| 182 | MIR4435- | 2492507 | CACCTCTACCTGTTGCCCGCCGATCACAGCCGGAATGCAGCT |
| | 1HG | | GAAAGATTCCCTGGGGCCTGGTT |
| 183 | MIR4435- | 2492508 | TATTTTGGTCATGGGCTGGTCTGGTCGGTTTCCCATTTGTCTG |
| | 1HG | | GCCAGTCTCTATGTGTCTTAATCCCTTGTCCTTCATTAA |
| 184 | MIR4435- | 2492509 | AAAGGCTGCAGTCACCAGCATCTTTTCCAACCTTAATGAACTG |
| | 1HG | | TATCCTCAAAAGAACACTATCAGACTG |
| 185 | MIR4435- | 2492510 | GCTCTGCCGACTTCCAGTTCTGGAACAAGATGGTTAAACTCAT |
| | 1HG | | TTTTCCCTGCTCTGCTCCTCTAAATACAACTAAGTACCTTGGAA |
| | | | ACTATTCAGCAGACAATGATAAAGGGCTCTGAAAGCTAGAAGA |
| | | | AAAGGTGTACTTGCAAGAAACCTCAGGACT |
| 186 | MIR4435- | 2492516 | GCTTCTGCAGTTTGCCTTGGAGTCTGGGCTGT |
| | 1HG | | |
| 187 | MIR4435- | 2492517 | TAAGAATGTAGATGCCGGTTGCACCTTCTGTTGTCTTGGAAGA |
| | 1HG | | GACTGCAGTGCTTGGCTGGAAAATAAGCTGCTCGGGACTCCT |
| | | | CTGAGA |
| 188 | MIR4435- | 2492518 | CCTACCCATGAGGAACAAGCCTGTGGGGGGACTGATATTATC |
| | 1HG | | ACTTCTGTCATCAAGAAATAAGGCCGCAGGCATCCCTGAATAT |
| | | | AGAGCATTTATTAATCGAACTGTGAAAATGAAACACAGACAGT |
| | | | GATGACAGCTGGAAGTTGGCCAATGTCCTGTTGTCATATTGCC |
| | | | CTCAGCCTAGGGACTGGCCTGTGGCTCACTGACCCTGTCTCC |
| | | | CACTCTCCACCTCTCATCAGCAACTGGACCTGGTGCACCTGGT |
| | | | CTACCTCATGTCCAGTGTTTTCCGCAGTACCTGACTGGTATCC |
| | | | CCACCCTTGGTTGTTGTGTGGTGAGCTCGTCCCTATGTTGGCA |
| | | | AGTTACTTAATTCCTAGGTGTCCCGCCTTCCTCACTGTAAAA |
| 189 | MIR4435- | 2492530 | CCCTGGCATCATATTGGGACTTGTTAAGGGCTGAATTGTGTCC |
| | 1HG | | CATCCCAAATTCGTATGGTGCCACCCCAACTCCAGTACCTTGG |
| | | | AATGTGACCGTATTTGGAGAAAGGGTCTCTGAAGAGGTAATTA |
| | | | AGGTAAAATGAGGTCATATGGGTGGCCTCTAATTCAATATGAC |
| 190 | MIR4435- | 2492538 | TTGCTGATATACTTACAAACTGGTAAACAATGCTCTTTAATCAA |
| | 1HG | | CAATTCATAATCTGGGTCAGCGATTTTTATCTCCATATTTGCTC |
| | | | ATACTGTATGACATCAATATTTTATATTGGCTTGCCCATAACTT |
| | | | A |
| 191 | MIR4435- | 2492544 | GCCAGTTCGCCTTTCGCTTTCTAAAATCATCTTGCTGGAGAGA |
| | 1HG | | ACGGTTATCAAATCCCATCCACTGCCCATGTAAAATAAATACC |
| | | | ATTCAGAAAAGCGTGGCATGGATGGCCATACTTCTGATGGGTT |
| | | | TATAACTGTAGATTGCATACGATCCCAACGTGAAGCCTGAAAT |
| | | | ACGACATTCAACGTCAGGCTTATTCCAGGCTACTGCTGTGGCT |
| | | | ACTTTTGTAATTCAACCAGTGGGGCGTTTTAGGCTAACGTATAT |
| | | | TGCCTCTAAGCTGATAAGCATTTTCCTGATCCCAGGCCCCTTC |
| | | | TAAAATTGAACACACACGTTCAGCTGGGGACACCTA |
| 192 | MIR4435- | 2492546 | TCAGTTTTGTGCTTACAGTCCCGCA |
| | 1HG | | |
| 193 | MIR4435- | 2492548 | TGGGAGGCCAAGGTGGGCGGATCATGAGCTCAGGGGTTCAA |
| | 1HG | | GACCAGCCTGGCCAACGTAGTGAAACCCCGTCTCTACTAAAA |
| | | | ACAAAAAAATTAGCTGGGCATGGTGGCGCACACCTGTAGTCC |
| | | | CAGCTACTCGGGAGGCTGAGGCAGGAGAATTGCTTGAACCTG |
| | | | GGAGGCAGAGGTTGCAGTGAGCTGAGATCGCTCCACTGCACT |
| | | | CCGGTTTGGGC |
| 194 | MIR4435- | 2492552 | CTGGGGACACTATGGCCCCATCCTAGCCTGGTG |
| | 1HG | | |
| 195 | MIR4435- | 2492554 | GAAAAGATTTTTATTCGTGTCTACATCAGTGTGAAAGGCTTCAT |
| | 1HG | | CCTGG |
| 196 | Ml R4435- | 2492556 | TGGACTTCTCTTTAGCTGGGGTGGTGGCTGCTGGAGAGGGCC |
| | 1HG | | CTGCTTGCTCATCTCTGCCAGCTTCCCAGTCCCTGCAACCAGC |
| | | | AGTGGCCAGCCTCTGGCCACCCCCATGAAAGCACATAAAAGG |
| | | | GTTGGGGA |
| 197 | MIR4435- | 2492558 | GGGAACAAAATGTCTGCTCAAACCATGACAAAATTGGCCACAA |
| | 1HG | | TTTGCCGATTGGGCTGATAACAAAAG |
| 198 | MIR4435- | 2492568 | AGGTCGAGGCACTGTCCTAGCTTGTGACCTGCTCCCATACCTA |
| | 1HG | | TTTTCTCAGGGTGGAAGCAGACGCTCCAACTCCCACA |
| 199 | MIR4435- | 2492569 | AGACCCAAAGCCTGTAGGAAGTATAGCAGGCCTCACCCAATA |
| | 1HG | | CCCTGCAGTT |
| 200 | MIR4435- | 2492571 | CCTCAAGAGAACATGGAGTCCTTTG |
| | 1HG | | |
| 201 | MIR4435- | 2492573 | TCAGTGGCCTCCGAGTAACCCACCTGCTCCAGTCTGCAGATTT |
| | 1HG | | CCATCTCACTGAC |
| 202 | MIR4435- | 2492575 | CAAAGGCTTCTCTTGCTGGCTGAGAATTGTTGGGGAGCTCCCT |
| | 1HG | | GCCCACGGAGGGC |
| 203 | MIR4435- | 2492577 | GGGTTCCTGTCGGAATCTTGGAGCTCATCCCCCAAACTTGAGA |
| | 1HG | | TT |
| 204 | MIR4435- | 2492581 | AAATGCTTAGGGAGACAGTTCACAGATATATATGTACTTCACA |
| | 1HG | | GGGCACAATTTAATCCATAAATCAATCATGGATCACTGCTAAA |
| | | | GAAAACAAAATATGCTGCCACTAATTTGCCACCACCCTGTGAG |
| | | | CATGATTGGATGATGTTTA |
| 205 | MIR4435- | 2492583 | AGGCAGCCTTTTCTGTCACAACACAACGCTGAGCCGGCAGCC |
| | 1HG | | TGGCTCTGTCAGGATCTGGGGCTCCAGCGCCCGAGAAGCCCA |
| | | | GCCTCGCCGGCGGCCAAGTTCACCGCGAGGCC |
| 206 | MIR4435- | 2492584 | CCGAGGAGGCGGAGCATGGAACTCGACAGTTAAAACATTTAA |
| | 1HG | | GAGA |
| 207 | MIR4435- | 2492590 | TGGCAGCTCCATCTACACAGTGTCGGGCTAGGCATGGGAGCA |
| | 1HG | | TTCTGGGCCAGGAGAAAGGGGATTGGATCCTGGATGGTGGGA |
| | | | ACCGCAGGTGTCCCCCTCCACGTGCCTGGGTCCAAGACTGCT |
| | | | CTGCTCTGGACCTTCTACGCCTTCAGAGGTACAAGTTGCAGTG |
| | | | CTACCCTTGCTGAACCTACAACCCTGTTCAAGTGACAACTTCT |
| | | | CTGAGTCTCATACGAGGATATTGAAAGAACCTTCTGCACAGGG |
| | | | CTGTTGTGAGGATTAACCGTAATAATACAAGAATATCTGGCAC |
| | | | TTGCATTCAGCAACTCACCGCTTACTTGTTCAACCAGGTAAAA |
| | | | AGGTTCTGATCCCAGTGTTGCAGGACAGAAAGACCTCCCCCT |
| | | | CTGTAGCTGCAGATGTGACCCAGCACAGAAAAAATGGCAGGT |
| | | | GAAAGACAGGCAGGAAGAGCAACTAAGAAGGTGGGAGGCAC |
| | | | CTCCATAAGATGCCTGAGGCCATGGGGATGACCGTTCACAGA |
| | | | GCTAGTCCCTCGAGCAATGTGTTA |
| 208 | MIR4435- | 2492591 | TGTGGCTCCAAGTTCCGTAGGACTCACTAGTCTTTTTTTCCCTA |
| | 1HG | | GAGGGTCTTGCCATTGAGAGGCAGGTGATGTGCTGTTTCAGA |
| | | | AAACAAAATTGGGACATGTCCTGATATGACATCCATCAAATATA |
| | | | TACAGATAGGTGTCACAGCCCCCGAAAAAGCTTATCTCTTCTA |
| | | | GGCCACACATAGCTATTTCCTCCAACTGTGTCAGACATTACAA |
| | | | AGTTTCTAGCAATCAAAACAAGTCAAATGCCATTCTCAGGACC |
| | | | CGTTGGAGGATTTTTTGCTTTGTTTTGGCTTTGTACGGTATCCA |
| | | | TACCATTTTCCAAATTCTTTTGTCCTTACATATTTTGTTTTTCTTA |
| | | | AAAAAAAAAAAATCACCTATAATCCCATCACCAGACAAAACCAC |
| | | | TAGAAAGAAACCAACATTTTAGCCATGTTTTTCTGTATATAAAA |
| | | | AAAGTGTGTGTGGAATTTTTCATAACAATATTGGGACCATGAC |
| | | | ATCTATCACATTTTTTATTAGGAAATGGCCTTCAACAATATGCA |
| | | | TTTAACAATATGCTTGATGTCTGTGTAATATTTCATCTAACAAAT |
| | | | ATATCATGATTTATTTAAGTATTCCCTGATTGCTTGCTTCTAACT |
| | | | AGAAAAAACAATTTTTCTAAGTGTCACCACTGGGTTAGAGTAAT |
| | | | CTCAGCCAATCCTCCTAATAGCACTGTGAGACCAGAGTTATGA |
| | | | TAATCTTCAGTTAATGGACAAGGGACATGATGGTGTGGAAGGA |
| | | | TAAATAAACTACCCAAAGACAACTAGCTAGTGAGACCAGCATG |
| | | | GACAGTCAAGCCCAGTGCATGTAATCTGTGCTCCCCTGCACT |
| | | | GTTGCTCATATACTTGGACCCTTGC |
| 209 | MIR4435- | 2492593 | CAACCCAGGGTCCTTGCAGAGAGATTGATCTGCCAGCAGTGG |
| | 1HG | | CATCAGCAGCAATAGTAGCAGCAGCAAAGCCCTGGACAGTCC |
| | | | TGGCCCCCAGTCCACAACTTAGACACAGCACATGGCCTAATTC |
| | | | ACCCACAGAAGCAGCCACTGTGAAGCCCTGTGTCTCCCCAGA |
| | | | CTCCATCCAGTGGCATAAGGAGACCCAGGCCCTGCAGCTTCC |
| | | | TCCCCATCATGGAAGGCTGTCCATCTA |
| 210 | MIR4435- | 2492595 | ACTTAAAATAGGAGTGAGGTGAGAGGGGCAGCTGGGCTCATG |
| | 1HG | | GACGTCAAGTGGACAGTTTCTCAGCTGGTATTTCCTATATTTC |
| | | | CTGTTTTGGACAGCAGGTTCCTGCCCTTCTAAGCTGGGGGTA |
| | | | GGGGTGAGGGAGTGTATGTTAAAAAGCTCTGTGGACTTGCT |
| 211 | MIR4435- | 2492597 | GGTATTACCTGATCCCAACTTGGCACCAAAAGACAGCCAACAT |
| | 1HG | | AGACTCATTCCTCCTGCTTCCTGGTGAGCCTGGTATTCTCCTC |
| | | | CACTTCCACTGACAGACATGTAGGGTGACTGGGTGGTATCAA |
| | | | CAATAGGAACCACATCATAACAGGCAGCCTAGTTTGGGAAGC |
| | | | ACTCTTGGTCTCCGTAGGCCTGAGACTCCTTTTGCCCATCTAG |
| | | | AGG |
| 212 | MIR4435- | 2492601 | AGACTGACCCTACAATAAATGCTTAAGAGAGTCCTACATCTGG |
| | 1HG | | AAGCAAAAGGGCTATATTCACCATCATGAAAACCCTAAAGTAT |
| | | | AAAACTCATTGGTAAAGCAGACACACAAATAAGAAAGAGAATG |
| | | | GAACCACATGTTATCATTACAGAAAACCACCAAACTGCAAAGA |
| | | | TAAACAAAGGAAAGAAAGAAAGAAAGAAAGGAAGGAAGAAAG |
| | | | GAAGGAAGAAAAAGGATTATTTAAAATTATCAGAAAACAATTGA |
| | | | AATGACAGGAATAAGACCTCACCTATCAATAACAACTTTTTTAA |
| | | | ATGGCTTAAATTTCCCAGTTAAAAGATATAGACTGGCTGAATG |
| | | | GATTTTAAAAGTGACCTAACTCTATGCTA |
| 213 | MIR4435- | 2492603 | AGAAGCTTGTTTTGAGCTCATTCAATATGCATCAGGTGGCGGT |
| | 1HG | | AACATCTGGAG |
| 214 | MIR4435- | 2492605 | AGGGTGCTGGTTCTGAGCCAACTTTGCATGGAAGGCCCAGCA |
| | 1HG | | GACCACGCTCATTACTTACAGCCAGCATCATCGGGGAACTCC |
| | | | GGCACAGA |
| 215 | MIR4435- | 2492607 | GCGGCCCTAGTCCACTCTCATGATGCCTCCATTAATCCCCCG |
| | 1HG | | GTCAGGGACCTTCCAGCCCTGCCCACAGCAGTCGATGCCTTC |
| | | | AGTGCATCTCAGTCTTCCACCC |
| 216 | MIR4435- | 2492609 | TCAGGTCATCCGCTCCATGGAGGTCCCCGTTCCTACCTTGGC |
| | 1HG | | CTTGCCTTTCCCCCTGCATGTAACCTTGGTGAACTTTTCACAA |
| | | | GAGTCTGCGCAGTCT |
| 217 | MIR4435- | 2492610 | TAAGCAGATTAATGCCGAGGAAAAGCCTTGGTGA |
| | 1HG | | |
| 218 | MIR4435- | 2492612 | CCCGTGGAGAGAGCCCCGCTGGTGAGGAAGCACGGGGACCC |
| | 1HG | | TGCTGCAGGGCTGGTGGAGGGCTCCTTCTGCAGACTTCTGAG |
| | | | CTTGGAGCACAGATGGG |
| 219 | MIR4435- | 2492614 | CTGGCTCCTGCACTACTATGGCCTTTTGGCTC |
| | 1HG | | |
| 220 | MIR4435- | 2492616 | TTCCAAGGTCTCACAAGAGTTTGCCTCCTCTCATTGCCATGTG |
| | 1HG | | AAGACCTCTGTGGGGGAACAATGCATGGGTTCTTGGGGTATT |
| | | | ATAGGGGACTACAGAGAAGTGTCACCTCCACCCAACAGCCTG |
| | | | ATTCAGTCTACTCCTCAGGAGGAACACAAAGTGGTCTCTCTAG |
| | | | TGCCATGAAACCCCAAAAAGTGTCAACCAGTATTAAAGGCCTG |
| | | | CCTGATATACAACCCTCGA |
| 221 | MIR4435- | 2492618 | ATGAAGCTAGGCCCCCCTGTCCTGACAGCTTTCCACCCCTTCC |
| | 1HG | | CTGCCCCTCTCACCCTGCTTTCCAGGGGCAATGCACCTCCCC |
| | | | ACTTCT |
| 222 | MIR4435- | 2492620 | CCAGACACCACTGGCCTACATCAAACTCCAGGCCACAGATGG |
| | 1HG | | AAATAGGACTGAGATCCCTGGACCTGGG |
| 223 | MIR4435- | 2492621 | AGATCAGGTGGATTGAGGATGTCACTGCCATCCCCTCCAAAA |
| | 1HG | | GCACCTGCAGGAAGGGGGTTGCCATGGTCACCATCTGTGAAC |
| | | | AGGACTCCTCAAAATGTTT |
| 224 | MIR4435- | 2492622 | TCAAGGTGGCCTTGCGCTTCACCGAGGAGGTGTCATTACCAA |
| | 1HG | | ACGTGCTGGACATTGGCTACCTACGGAAGAAAGATTAA |
| 225 | MIR4435- | 2492624 | CCTTCCTACCTGGTAGTAGCACTGACATCCTCTTCATCCACTG |
| | 1HG | | GAAGCTTCCAGATCCTGGCCCCCACAACCCATTCTCTCCCCAT |
| | | | AGGGCTTCCACAGAAACACAACGTGTACTGTGTGCCAAATGA |
| | | | CT |
| 226 | MIR4435- | 2492626 | TTATACATGGCCTCACTGTTGGGGAGGCAGTAGGGAGTGTTG |
| | 1HG | | GAGACCAGGGTCAGGACTAGGGCTAGGGCAAGGCTAGGAAG |
| | | | GTGCCCAGGATGCATGTTTTAAG |
| 227 | Ml R4435- | 2492628 | TAAGAAAAGGATCGTGGTGGTAGCAGGAAATAAGACAGAAATT |
| | 1HG | | TTCCATGGGGGCTCCAGGTCTGAA |
| 228 | MIR4435- | 2492636 | GTCTTTTCTTGAACAGGAACTTGCATACTCAAAAACAACA |
| | 1HG | | |
| 229 | MIR4435- | 2492638 | GATCCCGTGGAAACACAGCACCGGAGGATATGGGATAAGAGA |
| | 1HG | | CAACAGAGAGGAGTGGTGCTTCCTGAATTTAGGAAACATAGCT |
| | | | GCTACTTTGGGCCCTCTAGATACTTGAAAGAA |
| 230 | MIR4435- | 2492639 | AGGGAAGCCAGGTTGTTCATGGACATTCAGTGGAAGAATTAA |
| | 1HG | | GGCAATTAAATGTTAAGTTTTGCAGGGCTGGTCGACAAGAGAA |
| 231 | MIR4435- | 2492640 | GTGTGTATTCTCCATTGGTCACAATGCAC |
| | 1HG | | |
| 232 | MIR4435- | 2492642 | GACAAGAATAACTCCCCACTGGGACTGGAGGAGAGGAAGGCA |
| | 1HG | | CATGGGGGCCCTTGGCAGGGTGG |
| 233 | MIR4435- | 2492643 | TCAGTCACGTCTGCGCCAGAGCTTTGATGACCCACCTGTCAG |
| | 1HG | | CCACACTAAGGGCCCTGCCATGAATAAGGCCTCCGTCACTGA |
| | | | GGATCCTGTACCCCTCTGCCATAAACTCAGTGACCTGACTG |
| 234 | MIR4435- | 2492645 | GAACTCCCACTGTATAATTGCTAAACACAATGACAGCTATAATT |
| | 1HG | | GAGGCACTGAAGGAAGGTCAGGGGAGCCCAGGAGGGCGGG |
| | | | GCTGCTGCTGCCTGCTGAGCTGGGAGGGTTGGTGGCACCCC |
| | | | TTGCCCTGGGTTGCCATAGCAGATATCATAATCAATTACGGCC |
| | | | GTCTTTCATGAGGAACCTGGATCTTTCCCAAGGAATC |
| 235 | R3HDM1 | 2507381 | AGGGGCGGGATTCTGCCAGCCGCGGCTGCCGCTGGAGCCGG |
| | | | TGTCCGGGCTGGTGATGGGGTTAATTCCCTTTCGTAAGACTCT |
| | | | TACTTGC |
| 236 | R3HDM1 | 2507382 | CTGCCTCCGCGGCTGCTCTTGCAGCCCCAGGGACTCGGGAG |
| | | | CCAGCCACAGCAGGCCTGCCAAGAGCGTGGTACTGCTCTCTC |
| | | | GTGTGGCTGGCGCCGGTGCCCCGGGCTCCCCCGGCCGCCCC |
| | | | ACGGCCGCATCCCCTGGCCTTGCACCAAGAGAATTTTCAGCTT |
| | | | CGACCGGTTGG |
| 237 | R3HDM1 | 2507383 | CCCGGGATCAGATTTACACACGTTTTGATTCCTGAGCCTTAGG |
| | | | CTGCCAACAAATCTTTGTGGGCTTTGAAGTTTTTTGGTGTTTTG |
| | | | TTTTCTTTTGTTGCTGTGACTAGGTGCAAAGGGTG |
| 238 | R3HDM1 | 2507384 | TTGGGTTCTGAGGAAACATCTGAGTTTTGATCATTTCTTCAGG |
| | | | GTTTGAGAAGACTATGGTGGCTTAATGATCTTCTGTATTCCATA |
| | | | ACTAGTACACCTAGTTACAGAATTGACATAGATACATTCAGGT |
| | | | CCTGGAGGAAATTTGTGGTATCTATTAAAAAAATGAAAATTGCC |
| | | | AGTCATGTAGTAGTCACC |
| 239 | R3HDM1 | 2507385 | TATTATGCAGAAGATGTGCATTGCCATGCCTTGCAAGTAATAG |
| | | | GGTTTTTTTTCTTCTTTTTTGAACTGGTACTTTAATATACCTAAT |
| | | | TACATCCATTTGAGTTAGTATTAAGTTTTAATTTCTCAGAAATAA |
| | | | AGTAGTGAAAATTGGTAGCAGTTTTGTTTTTCCCATTCTTGAGA |
| | | | ATATTACAGTGATAAACAAGGCTTGATAGGTTTGTAAAATACTA |
| | | | TTGCTATTTGAATTAAAAAATTTCACTATTGACTTTCCATATTCT |
| | | | ATTGTAAATAAGTTGGGGAATTAGTGTGTCAAGGGGGTGTGGT |
| | | | AACAAATGGTAATGTAATTTTCAAATTGCTATTGCAGCACCAAA |
| | | | CCACAGA |
| 240 | R3HDM1 | 2507386 | TGAGACGTTAGCATCAACATGACTGTATATCATTTCCAGAATTT |
| | | | AATTCAATTAGTTATTGGCTGAGGGATGAAATAGAGATGAAAC |
| | | | TAAATCCTGGCCTCAAACTAGTTTTGTACCTTATTTTCCAGCAA |
| | | | TTTGGTTTTTTTATATCTAGATTTTATCTTTACTATTTTCCCTCAT |
| | | | CTTACCCATTCTTAGTCTCCATACACACCTATTAACTTTAATTTC |
| | | | CTTTTCTGAGAATTTTGAAAGCCCTATAGTTTATGATCTTTTTTC |
| | | | CCTCTTTGCCTTGTGAATTTTATATTTGTGAGTTTTTTCCAAATT |
| | | | TCTACCTGTCAGCTCACTTCTTTAGGCAAGGTGTAAGGTTTTT |
| | | | GAGCCCCCTTATTTCATTTTTTATTTTTTTAAGAGACAGGGATT |
| | | | CACCCTGTCACCCAGACTGGAGTGCAGCGACAGGATCATAGC |
| | | | TCACCACAGCCTTGAACTCTGAGGCTCAAGGGAGCTTCCCAT |
| | | | CTTATGCTCCCAAGTA |
| 241 | R3HDM1 | 2507387 | GTGTGCAGTGGACCGGTGAACATCACCACCTGAGCTCTGCCT |
| | | | CCTGTCAGATCAGCGGTGGCATTAGATTCTCATAGGATTGCAA |
| | | | ACCTTACTGTGAACTGCGCATGCAAGGGATCTGGGTTGCGTG |
| | | | CTTCTTATGAGAATCTAATGCCTGATGATCTGAGGTAGAACAG |
| | | | TTTCATCCCATAACCATCCTCCTCACCGCCTGCACCATCTGGG |
| | | | GAAAAATTATTTTCCACCAAACAGGTCCCTGGTGCCAAAAAGG |
| | | | TTGGGGACTGCTGCTCTTAGGACAGAAAGAAAGAAGTTCCATA |
| | | | ACTAGAGTAAAATATCACCTTACAGTATGAGGTAGCTTA |
| 242 | R3HDM1 | 2507388 | GCAATCAGAACACCTACAGCATTTATCAACTAAGTTCACTGTCT |
| | | | TATATGGGTGTGATTTGTGGTCCCCTAAAACAATTACAGTGGT |
| | | | AAAGATCACTGATTGCAGATCACCATCACCAGACATAATAATG |
| | | | AAAGAGTTTGAAATATTGCAAGAATTACCAAACTATTACACAGA |
| | | | GACATGAAGTGAGCACATGTTGGGAAAATGGTACTGATCGATA |
| | | | TGCTTGACTCAAGAGTTGCCACAAA |
| 243 | R3HDM1 | 2507389 | AAGTGATAGGATTGTTGCCCACCCAGGACGTTATGGATTCACT |
| | | | CAGCATTCATTCATGAAATATTCGTTGATAATTTACTATGTGCC |
| | | | GTGTACTGCCTATATAAAGCAGAGAGTACTTGCCCTTATGGAT |
| | | | TTTATTTTCTAGTGAGTGAGACAAA |
| 244 | R3HDM1 | 2507390 | AGAAACTAAATCACTGCCTTGTACAATAAAAAGCTCTATGTTGG |
| | | | GGTGATCAGACCCAACACCAGGTCATGGGGGCGATGAGTCC |
| | | | GGTGGAGTCAAAGGAATGAGAAAAAGACAGTTTGAGAGAGAA |
| | | | AGTGGGACCGGGGAGCCTACGCTATTTATTG |
| 245 | R3HDM1 | 2507391 | TGAAAATTGGGCCTTAAGCACATAAAAAGTTTTAAGTTCATACA |
| | | | GAGAAATAAGCTCACGCCTGTAATCCCAACACTTTGGGAGGC |
| | | | CAAGGTGGGTGGATCACCTGAGGTTTCTCAACCTCGAGACCA |
| | | | GCC |
| 246 | R3HDM1 | 2507392 | GCACTTCTCTGACTATAGTTTTTTATATGACTTTGACTCTCAGA |
| | | | ACCCTGGTAATTTTTTACGTAGTCTCCAGAAATAACATAAAATA |
| | | | ACTTAGATGTTGGCAAGTGTGGAGAAAGGAGCCCAAAATGTAA |
| | | | TGCAAGCACTAACAGATGAAC |
| 247 | R3HDM1 | 2507393 | ATGCCTTGGTCGTTTTGTGTCCCTGGGCTGTTGGCAGTGTGAC |
| | | | TCTGCTACAGAATACCACTTGGGGAGATCAGCTTACTCAGTAC |
| | | | AGGGTG |
| 248 | R3HDM1 | 2507394 | CAGATCTTTCTTCACATCGTGCAGGTAACGTATGAGCATTGTC |
| | | | TGATGGATCCTTACAACATTCCTGTATGCTTTTGGAAAGTATGA |
| | | | TCTTTGTTTAACAAAATGGGAAACAGAGGCACATGCTATACCC |
| | | | AGCTATCACAGAAAACAATAGTTAGAATCCAGAAAACATACTC |
| | | | ATCTGGTTTAGTGTGTTGCCCA |
| 249 | R3HDM1 | 2507395 | AGCAGGCACTCCCAATGCCAGACTAATCAGCTGG |
| 250 | R3HDM1 | 2507396 | GAGCTCTATAGAGGAGCAATGCAGAGCATCAGTTTACAGGTA |
| | | | CTATGGAA |
| 251 | R3HDM1 | 2507397 | AATCTTGCCATACTTGCACAGCTGACCAAC |
| 252 | R3HDM1 | 2507398 | ATTCAACTGCTAGAGAATGTGAAGTTTCACATTTTAAGCCATCA |
| | | | AAGAACCATTGG |
| 253 | R3HDM1 | 2507399 | TGTGCCAAAACAGTCCTGAATGTTCGTGTTGGCCTTAATGAAC |
| | | | CACCCCTTAGTGACTCAGTCACCATTCTCCACAAGCCCTACAG |
| | | | CCATCCCGG |
| 254 | R3HDM1 | 2507400 | CCTCAGCTGCAAACTATGTAATACTGCTTTTATGGGGATTAAAT |
| | | | GAATTAATACACTTAAAGCATTGGGAGTAGTGCTTAGTAAATAA |
| | | | TAAATAACTCTTTAAGGGTTTGCTGTTAATATTACCAGTTTCAC |
| | | | AGCACATATTGCAATCAGTTATTATCTTGTATATTTTGTCTCTG |
| | | | CACTAGAATGTAAGCATTTTAGGTTCTAGGATCCCATCTGCTT |
| | | | GGTTCACTCATGTATCCCTATTACCTAGAACAGTGCTCTGTAC |
| | | | ATAGTATCCAGTCTG |
| 255 | R3HDM1 | 2507401 | GCGCCCAGCCTAATACTAAGCTTCTAATCTTAA |
| 256 | R3HDM1 | 2507402 | GTCCATTCCAGTCCGGGAATCTACAGTGGTGACAAGGACATG |
| | | | GGACTCCTCCTGCCAGATTACAGATGGTTCACTACAGTTGACA |
| | | | TCCTGGCTGACAACTGTGAAAAAGAACCTTGGATTATTTTATTT |
| | | | TATTTTTGTGGGACACCACAATCCCAAATCC |
| 257 | R3HDM1 | 2507403 | GCTTCAAGCTCCCTGTAGAATTCGAAAATAAC |
| 258 | R3HDM1 | 2507404 | GATGTCTGATACTGTTACTGTAAAAGAT |
| 259 | R3HDM1 | 2507405 | AAGTGAAAGATACAACCAGAGTTGAAAATCTTATCAAATCAGA |
| | | | AAACTATGGGAAGATTTTGGTAGAGAAGAATGAACATTGTATT |
| | | | GAGAACAATATAGATTTGCAG |
| 260 | R3HDM1 | 2507406 | TCATACAAAACTCACTTCTCAAAATTC |
| 261 | R3HDM1 | 2507407 | TCAGTCAGGAAACGAAGCAAGGCTTGGGCTGAGTGAATTTTCT |
| | | | ATTCTACAGGGTATCCAAAGAGGTCCTTTGTTGGCATTTAACA |
| | | | GGCCGGTGGACTTGGTCTGGAGCATCCCGGATTGCTTCTCGC |
| | | | ACCTGTCTGG |
| 262 | R3HDM1 | 2507408 | CAACAAGGTGGGTCCAAAGTAGTCAGACTTCTTATGTGGCAG |
| | | | CTCAGGGGTCCCAGAGAGAATGTTCCAAGAAAGCCAAGCAAA |
| | | | GCTGCAAGGTTTCTTTTGACATAGGCCCAGAAGTTCCAGAACG |
| | | | TTACTTCAGCTATC |
| 263 | R3HDM1 | 2507409 | CATAGCGACTGTAACGATTTGGAAGGAGGGA |
| 264 | R3HDM1 | 2507410 | CAATGCCACGCTTCTTCGACAATGAAGGCAGTACATAA |
| 265 | R3HDM1 | 2507411 | AATCTTAGCTATTTCCTGTTTGTCAAACAAAGATTAAAAGCATG |
| | | | TATGTGGCAAAGCGTGGTGGCTCCTGCCAGCACTTTGGGATG |
| | | | CCGAGGCAGGAGGTTTACCTGAGCCCAGGACTTTGAGACCAG |
| | | | CCTGGACAACACACGAAGACTTTGTCTCTACAAAAATAAAAAT |
| | | | AAAAAAATTATTCATGCGTCACGGTACATACCTGTA |
| 266 | R3HDM1 | 2507412 | CGGCCATTGCAGTCATTTGGACAGAC |
| 267 | R3HDM1 | 2507413 | CAAGCTCAAAGTTAAAGCTAGTTCGGAGCCTTGCAGTGTGTGA |
| | | | AGAATCTCCACCACCCCCTGCACCAGAGATATCACAGGAGAA |
| | | | CCA |
| 268 | R3HDM1 | 2507414 | TGAGTGTAAGGAAGTTGCCAGTGTCTTTGGTAAACAAGACAGA |
| | | | GAGTGCAAAAAGCAAGTGTTTGTCATCCTAGTAAAAACTGCCA |
| | | | GTGTGCATCATTTACCCTATATTATGAACACAAATTTTAACTGG |
| | | | TATGATGAATTAAGAAGA |
| 269 | R3HDM1 | 2507415 | AATTCAGATCCAGTTAACACAATCATTTGAGAAAGAAGAGAAG |
| | | | CCCTCAAAAGATGAAGCAGAAAAAGAAAAGGCCAGTGATAAGT |
| | | | TGCCCAGAAAA |
| 270 | R3HDM1 | 2507416 | ATTCCAGTCAAGAATACACTGATTCAACTGGCATAGATCTACAT |
| | | | GAATTTTTAGTA |
| 271 | R3HDM1 | 2507417 | CCTCTATAGATGCAAACGTTTTTAAGTTATCCACATAGACATTT |
| | | | TTTAACTGTACGGTTTAATGGTTTTTAGTATATTCAATATACAGA |
| | | | TAGGAGCACTATCACCACAGTTATAGAACTTTTTCATTGCCCCA |
| | | | AAAGAAACCCCATACATTGTAGCTATTCCTATGCTAATAATAAT |
| | | | AGTAATACTGATATTGGATGATCCCAACCCTAATCTGTTTTCTG |
| | | | TTTCTGTAGATTTCCCTGTTCTGGACATCTCATATGAATGAAAT |
| | | | TATATAATGTATGGTCGTTCATGACTGGCTTTTA |
| 272 | R3HDM1 | 2507418 | ACAGTTTTGTGAGTTCAGGTCAGGAGATGAGGCTGGAGCTGG |
| | | | ATGAAGACCAGCTCATGCCTGCCTTGTACATATGTTTAGTTCTA |
| | | | AGAACAGTAAGAAACCCATGACAGATTTAACAAAGGGAGTGAT |
| | | | GTGTGATCACATATGTGTTCTTAAAAGATTGTTATGCATGTTTC |
| | | | ATGTAGAATAGATTAGGGAAGATCAGGGAAGATACAGGGAGA |
| | | | CAATATACTCCTGCTGTAGTAGTCAAGCCAGAAATCCTGTTGC |
| | | | CTGGATCCAGGGTTGTGGCAGTAGAAAAATA |
| 273 | R3HDM1 | 2507419 | CTGATGTGTAGACTTTCAGGTGACCAAAGCAGGGGCTACCAG |
| | | | TTCTTCTATTGAAATTGAGAATAATCTGCATAGTGTTTATTTTAG |
| | | | GGAATCATTAACCTCTTGGCCTCGTTTTCTTGATCTGTAAACTT |
| | | | TGGAAGACAAAACTGAATGATTTGTAAAGCTGCTTTTAGCTTTA |
| | | | AGTTTCTGTAAGTTACATTTTTTTTTTCACATGTATATGAAATTT |
| | | | CCAATTAGCACAGGAAAATTCTAGAGCCATGTTATGGGTGTGT |
| | | | GAGCAGGGAGGTCCTTTGGGGAGTGATACCATTAATTTGTTGC |
| | | | AGCTAAGAGAACTAAATAAGACCCTAGTGATCTAAAGGAGCAC |
| | | | ATACAGGTACTCCCTAGAGTCCTTATTTATTTTATATGTTGGAG |
| | | | GTTTTTGGTTCACTTAGATTTTTATGGGAAAATTTAAAAATATAT |
| | | | AATGGCAGTTTATAGAATGGGTTGAAATATCCTCTTCTTCTAAA |
| | | | TTAGCGATATAATTAATACTTCTCTGCCATAGTCCCATCTACAT |
| | | | ACTAGTATTAGATTCCCATAGAAGTATTCCTGTTGTTACTGGCA |
| | | | TTGCATGTTCTTTAGAATACTGTTTCTATGGAGTTCAGCATGAT |
| | | | AACAAAGTCCTGAGCCTAACTAAAGATGTCTGT |
| 274 | R3HDM1 | 2507420 | ATGCTGCTGAAATTGGAACAAGAAATTTTAGATTTCATTGGTAA |
| | | | TA |
| 275 | R3HDM1 | 2507421 | GACATCTTACCATAGGATGCTATTACACAGAGTAGCCGCTTAC |
| | | | TTTGGATTAGACCACAATGTTGAT |
| 276 | R3HDM1 | 2507422 | TGGGAAGTCTGTCATAGTAAACAAAACTAGCAA |
| 277 | R3HDM1 | 2507423 | CTCCAGCCTTGAATCAGTGGTGTTATGGATGTCAACAACCCAG |
| | | | TGTCCACTGGGGTGTCTCAATGGAGCGGGAAGTTGGCGATTA |
| | | | CAGGGCAGTAAATTCAGGCATCTATAA |
| 278 | R3HDM1 | 2507424 | AACCTTGTGTTTGTCCTCTAGATCACAGTGGAACTTGCAACATT |
| | | | TCTGTGGAAGAAAGATGAGTCCACTATAAAATGTATTGCTAAG |
| | | | ATTTCATAATCGTTACTTTAGGTCACAACTTTGACTTCTATAAAA |
| | | | GAACATCTCTTTTCTAACCTGTTCCAGTTAATGTTAGCAAACCT |
| | | | GTGCCCTACTGTAATTTAAAATTAATGGATGCACTTTGAAGTAG |
| | | | TCTGTAAGTTTTTAGCTAATTGAATGACAAAATATTTTATTACTT |
| | | | TCAGGTATAACACCAAACTAGGTACCATAGGAGTAGCATAAGA |
| | | | TACGGCACTGCACTTTCCTTGTCCCAGCATTTTTTCGTAGGTTT |
| | | | AGACGAGGCAGTACAGGCTTTGGGTCTAACTGACCTGAGCTC |
| | | | CAACTATGGCTTAATCATATGCCTGCCTTTGACCTTGCATATTT |
| | | | GCTTAAGCCATTTGAACCTCGGTTTG |
| 279 | R3HDM1 | 2507425 | AAGGATGATAAAGGTGAAGACTTTCAGAAACGTTATATCCTCA |
| | | | AGAGAGATAACTC |
| 280 | R3HDM1 | 2507426 | CTAGAACAATTGTAGGATTTGTATAGGTGCAAGACATACTATA |
| | | | CCAGTAGTTCATTTGCCTAAAA |
| 281 | R3HDM1 | 2507427 | GAGAATACGTTTGAAAGATGACAGAAGAAGCAAATCTATAGAA |
| | | | GAAAGAGAAGAAGAGTACCAGAGAGCCAGAGACCGAATATTT |
| | | | TCCCAAGA |
| 282 | R3HDM1 | 2507428 | TTACGTTGTAGGGTCTCAGTCTCCCTTTTATCTATTGATCACAT |
| | | | TTATTTTTAATCACATTTGTTGCACATAAGGTCATCTTTTAGAAA |
| | | | TATTGAGATCAGTTTTGCTTGTGTTATTAATAGTTTATAAAATAC |
| | | | TACATTGCAGTAGTTATATAAAATTTTACAAAAGTTGGAAGCAG |
| | | | GTAGACTACAGGAGTCATTAAAAGAATGTTCTCCAGTCTATATA |
| | | | GTTTGTGTGATTTTTTTTCCCCAGACTTGTGACAGACTTGAGAT |
| | | | TTTTATTAATAGAAATTGCTCCACTGTCTACAAAATCATATACTC |
| | | | TAGATGCTACTTGTTAGTTGACTTTCTTTGACAAATAATTTATTT |
| | | | CTTCTTTTGAAATAAAGCTAATTGATTTTGTAGGTTAATATCTGT |
| | | | TTTCTTCTTCATAAGTGATTATATAAGATAGGCTTTCTAAATGG |
| | | | CTAATTATTTTATGCATATATGCCAGAAGAGAATCAATTTGTTTT |
| | | | TTGTCAACATCTACTAAGCATCTGTCCTGTAATATGTGTTA |
| 283 | R3HDM1 | 2507429 | CCTGTGTTCCCAAGAGAATTACATTATTGACAA |
| 284 | R3HDM1 | 2507430 | ATGCCAGTAGTACCCAGCAGAGGCGCCAGATATTTAG |
| 285 | R3HDM1 | 2507431 | TGAAGTACTCGGAACCACGACCCTGGAGCAGCACAGATTCAG |
| | | | ACAGCTCTCTTCGAAACCTGAAACCTGCTGTAACCAAAGCCAG |
| | | | CAGCTTCAGTGGAATCTCAGTCCTGACAAGAG |
| 286 | R3HDM1 | 2507432 | GCAAAAGCATAGGCAGGCTTTCAAAA |
| 287 | R3HDM1 | 2507433 | TCCGGAGCACTTAAGGGGTAATATGTTTCTTGACATGAGGATT |
| | | | CACTCTCTGTCCTGGACACAGATTTACAACCATCAATTACCATA |
| | | | AAAATTCTTCTCTATTGTGACATAAACTTAATTAGGTAGGTTCA |
| | | | ATGAAACATTATCTCTTGATTGAATGCCCATAGGTAATTGGAAA |
| | | | TTCTTTATTACTTATTCGTAGTTGGTAGAAGGCATGGTTTCTCA |
| | | | CCTAGGATTATTTA |
| 288 | R3HDM1 | 2507434 | AATCAGCTGGGCGTAATAGCACGTGTCTGTAG |
| 289 | R3HDM1 | 2507435 | TAGGGTCATCTACAGGCTCTCTTTCTCACATCCAGCAGCCTCT |
| | | | TCCAGGTACAGCTCTCAGCCAGTCTTCTCATGGCGCACCTGTC |
| | | | GTCTATCCAACTGTCAGCACTCATAGTTCTCTTTCCTTTGATGG |
| | | | TGGCCTAAATGGGCAAGTCGCATCTCCTAGCACTAGCTTCTTT |
| | | | TTGCTTCCCTTGGAAGCGGCAGGCATAC |
| 290 | R3HDM1 | 2507436 | TGATCTCTGGTTTTTGACAACAGTATTACAATACATTTAACTTTT |
| | | | TTAAGATGACCCTTAAATTACATTTGACCGCCTTCACCCAAATC |
| | | | TGCTCCACCAATTTTTTCTCCAAATTATTTAGCAGTCAACAAAT |
| | | | ACCCAGGACAACTTGTTTTTAGTTATCTATAACTGTCACACAAA |
| | | | TTATCAGTATACTAATTGATTAAAATAATTTTACTTTAGAGTACT |
| | | | TTTTCTGCTTGATAGCTATAGACTAGTATAGTCTTCTCTCCCAA |
| | | | ATA |
| 291 | R3HDM1 | 2507437 | ATGGGAGTCCAGTTGTGTATAATCCTCCTATGACTCAACAACC |
| | | | AGTTAGATCCCAAGTGCCTGGACCTCCA |
| 292 | R3HDM1 | 2507438 | AACAACCAGCAGCTAATCACATTTTCTCACAG |
| 293 | R3HDM1 | 2507439 | GTTGACTTGCCTTTACATATTTGGGACTAAATTCGCTAATTATA |
| | | | ATTGAGATAGCCTAAGTATCTCTTAGAACTTTAATATTCTGCCA |
| | | | CTAGTGATATTCCACTCACTACTCATAGGAAAAGAGATAACTTC |
| | | | AAAGGTTTTTCCCCTGATAAATACTGAAAATATGTTGGAAAGAA |
| | | | GGGAATTGTTTTAATCATATGAGCCTGTCTGGTGAGTATTTTAT |
| | | | CCCTATTTCACAACAGCAAGAAATGGACAACAGGAGAAATAAA |
| | | | AACAAAACTGTGATTGTTCATTGGCCCAATGAGCAAAGTGAGT |
| | | | TGTTTTAAGATTCCACAGATTAAGCAGTTAGAAGAAACTGAGAT |
| | | | AGGCTGCTCAGGTTCTGCAAGGTACTCTTC |
| 294 | R3HDM1 | 2507440 | GAAGAAGTATGATGATAAACTTGAACTG |
| 295 | R3HDM1 | 2507441 | TTGTGGTAAAAGTGCAACTCAAATCATTATTATCTATCTATGAT |
| | | | GTCATAGACAAACAATGTCTATCTTAGTTGACATAGAAGTTCTC |
| | | | TATTTAAATTATTGCCTGAACAATCTTAATTCCATTAGTTTATCT |
| | | | AACATTTTTAAAGTATTGTCTCTGAAGACAACATGCAGAGATAT |
| | | | TGTTCAGAAGGAGATGCATGAATATACATTTTAACTAAGAGTTT |
| | | | TCATCAAGTGAGATTCCCTGGGTTCCTCATCTACTTGCTTATGT |
| | | | GGCTGTCTACAAGTCACTTAATT |
| 296 | R3HDM1 | 2507442 | TCTGCAGTCCTCTTCACAGCCTGTTCAGTACTCTACAGCCCCT |
| | | | TACCCATCCCCGTTCCTGCCAGTCTCACCCACC |
| 297 | R3HDM1 | 2507443 | GATAACCTAGGGTCTCAGTTTAGCCACATGAGTCTTGCTCGCC |
| | | | AGCCATCTGCTGATGGTTCTGACCCTCATGCCGCCATGTTCCA |
| | | | GTCCACTGTGGTTCTT |
| 298 | R3HDM1 | 2507444 | GTTATATCATGACAGCAGCCCCTCCACCACATCCTCCTCCACC |
| | | | GCCACCACCACCACCTCCTCCTCCTCCCCTACCACCTGGGCA |
| | | | GCCAG |
| 299 | R3HDM1 | 2507445 | CCTACTGCTGGATATCCTGCCTCTGGTCATC |
| 300 | R3HDM1 | 2507446 | ATGGTTATTAGTTGGGTTCTGCCTCTTTATACAGTGATTGGAGT |
| | | | GTCATTAGACCCTTTAAATTTAATATATTTTTGACATGGTATGC |
| | | | CATGTCATACCAGATTCAGGTATGCCACATTGCTATTTTTTTAT |
| | | | TTGCCCTATCTGTATTTTATTCTACTTTCCTGCATTTTATATTAT |
| | | | TTGAACTTTTTTTTTTTATAATATTGAATGCTTTACGAATTTCCG |
| | | | TGTC |
| 301 | R3HDM1 | 2507447 | TAGCCTTAAGGTAATATAAGCCATATTTTAAATAATTTCATGCA |
| | | | TGATGTAAAGTTTTGACTGTAACCTGTCACATGAGGTCAGGTG |
| | | | TGGAGTTTCTTTTTGAGTACTGACATGACATGATGCTTTTGGCA |
| | | | TCATGTTGGTACTCAGAAAGTTAAAGATTTTGGAGCATTTCAGA |
| | | | TTTTGGACATTTGGATTTTTAAAATACTCGCCCAGGCTCA |
| 302 | R3HDM1 | 2507448 | ATGCCAGCCTGTTATTGCGCTCCAG |
| 303 | R3HDM1 | 2507449 | GCCACTATCACTCCAGCCAACCTCAGTATCGCCCAGTCCCTTC |
| | | | TGTTCATTACAATTCACATCTAAACCAACCA |
| 304 | R3HDM1 | 2507450 | GTCTCTCAGGATCTCGAATATGTTCATACATATGAGTTTGCAAA |
| | | | CCAATGAGATTAAAAGAGTGAGCAAATCTTAGCATCCTCTGGA |
| | | | AAATACCACAGTGTCACGTCTACATGCTAAAGGGTTGGGAGCT |
| | | | GTACTGGGAATATCTTAAGCAGTTTGTTAAGTGGCTGCCATCT |
| | | | CTTACTGCCATTGAGATTGAAACTGTCTTTGCAGCCTGATAAAT |
| | | | CACCTATGG |
| 305 | R3HDM1 | 2507451 | AAACAATTTTGATCTCAGTGTATAAAACTATCTTATTGATTTTTT |
| | | | AATGAACTCATTTCTCTGTATGCTTCT |
| 306 | R3HDM1 | 2507452 | TCAGCCTTTTATAACTCTAGGAGTT |
| 307 | R3HDM1 | 2507453 | AAGTTTGTAGCTTCACCATATACATTTAATATTTTGCAATAATTG |
| | | | GCCTTGTTC |
| 308 | R3HDM1 | 2507454 | AGCTGTTGGATTCGGGGCCGTAGCACTGTCTGAGAGGTTTAC |
| | | | ATTTCTCACAGTG |
| 309 | R3HDM1 | 2507455 | AGCATGACATCAAACGGACCTAATACACCTAAATGCATTTGAA |
| | | | GCTACTTGGTCTCGGTTCTTACCAACGATATAATTTAATTTTTTT |
| | | | TTCCAAACGATGATGTTGTTGCATACCTGTGGAAAGCAAAATG |
| | | | ATTCTGTGAAACTATACTTTTAGTTTTGCAACCATTTGATAACTT |
| | | | CAAAGATTATCAATGTATTATATCTTTAGTCTTAGCTTTCCAGAT |
| | | | AACCCAGA |
| 310 | R3HDM1 | 2507456 | TAACCTGCCGCCACTGAAATCTGGAGCCAAATATATCTGGTAA |
| | | | GTACCCACAGATTTCCTTGAGTTGTATAGACTCTTCCATGGAAT |
| | | | AGTTCTTTAAATAGCTGTGAGCAATAAACTCTGTGTGACTGTTT |
| | | | TTGTTAGAATTGGTTTTTGTATATGTATATGTTTATTTCAGGCAC |
| | | | AGGAGTGAGAGAAGAGGGGATGAGAGATGAGAAGGGATAATC |
| | | | AAGTGTGATGGCAATTGCATCTCCTTCCAAATACACCCATGGG |
| | | | GCTGGCTTTAGTTGAACTTGCCCACCTACTAAAATAG |
| 311 | R3HDM1 | 2507457 | TCGCCCATAAAACGTAGCAGCTCTCCTTGCACAAAATGTGTCC |
| | | | AGGTTAAAGCTGGCACTGCCCTGCTGAGTAAAGTCTGACTTCT |
| | | | TGGCAAAGCAGCCTGACTTTGTGGAGAAGACAGCCAGTATCT |
| | | | ATGAAAACTCTGCTAGACTAATCTTGTATAGACTCATCTGGAAT |
| | | | GTGGCAACAGACTTTTTGAGCAAAAGCAGCCTCCGAGGCAAA |
| | | | ACAGCAAAACTAAAGCCCAAAGGGAACATTGGAGATTCACTTG |
| | | | GAAATACTCAGGCTGAGAGACAGAACTGTGGGATGTGGAACC |
| | | | TGAAATAGTGTCACTATTTGAGCCAGTTCTTCTCCTTCCCAATT |
| | | | GTCTTTTGTTATGTTTTAATATTTTTAGAGATGGAGTCTCACTGT |
| | | | TTTGCCTAGACTGGAGTGCAGTGGCCCTTCCTAATTGTTTAAT |
| | | | ACAATTTATGCGTATAATCTAATTATAGTAAGGCAAGGAAGTGT |
| | | | AACTTTGAAATACATCAGTAGTAAACCACGCATCTTGCGGGTA |
| | | | GTGGACAAACCA |
| 312 | R3HDM1 | 2507458 | GCCTGAGCGATAGAGACTGCATCTGAAAACAAACAAACAAAAA |
| | | | GAATAAGATACCATTGGAAATTTACTCATGCAGCTTTCATGAT |
| 313 | R3HDM1 | 2507459 | ATGAATTCAGAGCAGGATTTAACTCATTGTACCATTACAG |
| 314 | R3HDM1 | 2507460 | TACCAAGGAATAGTTGGAGTTCAGCAACCCCAGAGTCAGAGC |
| | | | CTAGTCAGTGGCCAACCCAACAGCATTGGAAATCAGATTCAAG |
| | | | GAGTGGTCATCCC |
| 315 | R3HDM1 | 2507461 | CCATCAGACTTATCAACAGCCTGTTATGTTCCCTAATCAGTCTA |
| | | | ATCAAGGATCTATGCCCACAACAGGAATGCCTGTTTACTATAG |
| | | | TGTCATTCCACCTGGTCAACAA |
| 316 | R3HDM1 | 2507462 | AGTCTTTGGAATTACCCGCAGCTTGGACCCAAATGAGGCAGAT |
| | | | AAACTTGAAATAAGGTAGATGTAAGCTGACAGTAGTGATTGGT |
| | | | CACCATGTGACAAACTAGCATTGATCTGTTCCAAGTATAGAGT |
| | | | ACCAATGTGAGAAATTGAATGAGTTGTACGTGAAGCAGGGAAT |
| | | | GTGTATTCTGTCAGACTCATCTTGGTACATTTTGGA |
| 317 | R3HDM1 | 2507463 | CAGGGTCTTGATCCATACAGTCTTACTATGTTTTAGATGCTAAA |
| | | | TGGACTCTAGTAGCCTTCATTTTATTACAAGATTATAAGGAATA |
| | | | AGATTCCTATAAGAACACAAAGTGAGTCTTTGTTTTGAAAAATG |
| | | | TCTTACTTAGCTTGGGTTGCTTAGCAAAATTGTTTTCTTACAGA |
| | | | GGTTCCTTGTGTAGAAAGGTAGAATTTGAATTATTATGTCTACT |
| | | | TTCAGCTCATCCTTTCAGTTCACTGAGGCAACTTTGTGTTTGGA |
| | | | TTGGATTGTGTTGTTACTTATCATTATGAAGATTGAGCACAGCC |
| | | | TGATACAAGTCAACATATACTGTCACTTTAAGCGAGCAAAGTA |
| | | | CTAGTCAGGGACACTAATTTTACAACAACTCATGAGATTTTTCT |
| | | | CAGTCCTTAGTGTGGAGAGAAAATTAGTTTGATACCAGCAGCC |
| | | | TTCAAAAGTGGGCAAGTGAGTTGGATATCTTCAAAATGCTCTC |
| | | | ATTTTTACCGGTTCTTCTCCTATTTTCCCTTTCATTTTCACTATT |
| | | | TTTATCTTGAAATTCAAAACGATAATACCTTTGTCTTTGATCTAT |
| | | | ATTCTCAAAGGGGTAGCATACAGACAGGAACTTGAAAAGACTA |
| | | | TAGCCTTTTTTTAAGAACCTTTAAAAAATGTTTCACAGAATCTTT |
| | | | ATGAAATTATGAAAAAGAAAACCTACTTTTAAGTCTTTTTCCCTT |
| | | | TTTTCTGTCCACAGTCTGTTTTTCCTCATTTTTGTATCCTAGTAT |
| | | | TTCTCTAGTGTCCCTTTTGTCCTACTTGTGATACCTCTCTTG |
| 318 | R3HDM1 | 2507464 | TTTTGGGTGGCAGATAACATTTTACTTAATTGGGGTTCAAAGTT |
| | | | AGTGTTCTTTGTCATCAAGTTGATTTCAGATGTTCATCTGTAAA |
| | | | AACCATTCTTAGCTTGGAGGCAATACAGAAGCAAGCAGTGGTC |
| | | | TGGGTTTTGCCTATAGGCCATAGTTTGCCAACTCCTGTACTAG |
| | | | ATGGTTGATAGCCAGCAAAAAAAAAAGACAAAGAGGCAGTGG |
| | | | TCACAAATGAAGACCAACAACTTAGGAAAAAGGAGTGTGGAAG |
| | | | CCAACATACAAGGAGATTT |
| 319 | R3HDM1 | 2507465 | TCAGCCGACTTAGAAGCAATACAAGCCAGAAGACAGTGGAGC |
| | | | AACATCTTTATTTGAAGAAGTGAAAGAAAGAAAACTTGCATTCT |
| | | | ATACCTGTAAAAATATTTTTCAGAAACAGAGATTTCAAACACAC |
| | | | AAAAGCTGAATTAATTGCCAGCCACCTCGCACTGTGAGAACTG |
| | | | TTAAAGGAAGTTT |
| 320 | R3HDM1 | 2507466 | AGGCAACTTTGGTGAGGCTTTATGGTGTGCATATACATAAAAC |
| | | | TCTTTAAATTATATACTTTATGTGTGGTTTATTTTCTATAAATTAT |
| | | | ACCTCAGTAAAACTATAAAATAATCTGAGTCTTAAATTTTTTCTT |
| | | | AGAGACTGGTTCTTGCTGTCATTTAGGCTGGAATGCAGTGGTG |
| | | | TGATCCTGACTCACTGAGGCCTCAACCTCCTGGGCTCAAGCA |
| | | | ATCCTCCTGCGTCAGCCTCCCAAGTAGCTGGGACTACAGGTG |
| | | | CACGCCACCACACCTGGCTAATTTTTTAATTTTTTTTAAAGATA |
| | | | GGATCTCACTGTATTACCCTGCTGGTGTCGAACTTTTGGGCTC |
| | | | AAGCAATCCTCCCACCTCAGTCTCCCAAACTGCTGGGTTTACA |
| | | | GATGTGAGCCACCTTGCCTAGCCTTCTTTTCTAATAGTTTAAAC |
| | | | AAAGACTAGTTTTGGATAAAGTGAAAAGAAATACTGTAAAACTA |
| | | | ACAAATTATTAAAAACAAGAGTAAGAATTTGTGAGGTTAAGATA |
| | | | GGCCACAGGGCATTTAATGGAGGAATAAAGGTAGACTTGAAC |
| | | | TAACTGTAAAACCTGTTACAGAGTCATATTGAAATGTTAAAATT |
| | | | TAATCAAAAGTGTTTTTTTCAAAAAGCAAATGACTAAAAACTCC |
| | | | TTTCAGCCAGAGGTGAGAGATCGGGGGGAAACAAAAAAACAA |
| | | | TAAAAAGAAAGTCCAAATACCTATGTTGCACCAGCCTGACCAA |
| | | | CATAGTGAAGCCCCACCTTTACTAAAAATACAAGAAATTAGCT |
| | | | GGAAGTGGTGGCATACTCCTGTAATCCCAACAAAATACATGTA |
| | | | AAACCTTTATGCCCAAAACCATCTTGTGATGTGGAAGATTTGTA |
| | | | CTCCCTATGGTTTATATCTTAGAACAGATGTCAGAAAACTACAG |
| | | | CCCACAATCAAAGAATGGTTTTTAAATTTGTAAAGGATTATTAT |
| | | | TTTTTAACTCCTAAGTGACCATGTGTTACTCAGAGTTAAAATAT |
| | | | ATACTAGCTGGCTCTTGCAGAAAAAGTTTACCAGCATCTGCCT |
| | | | TAAAAAAACCTTGGCAGATAGGTATCAGAGACATGTTTATGAA |
| | | | TGTTTGTAGCAACAATGTTTAGCCTAATACTGGAAGTAATCCAA |
| | | | ATAAAATGGAATAGAATGTGTAAGTATATTTTGATGTATTCATTT |
| | | | CAGACACTACTATACAACAAAGAAAATTACTAAAGTACAACTAC |
| | | | TTGTATCCAATTGGTTGAGTCTCACAGA |
| 321 | R3HDM1 | 2507467 | GTTGGACAAAGTGGGTCACGCCTGT |
| 322 | R3HDM1 | 2507468 | AGGCAGGGATGCTTCTAAGATACTAGCAATGTTCTGTTTCCCA |
| | | | ATCTGAATGAAGTTACATAGATAATTATTTTGTTATTATACTTAA |
| | | | TTTAAACTGTAATATATTTCTAAGCACTCTATATTCGTCTGTTCT |
| | | | CGCATTGCTATAAAGAAATGCCTGAGACTGAGTAATCTATAAA |
| | | | GAAAAGAGGTTTAATTGGCTCACAGCTCCGCAGGCTGCATAG |
| | | | GAAGCATAGTGGCTTCTAGGGAGGCCTCGGGAAACTTCAATT |
| | | | ATGGCAGAAGGCAAGAGGGAAGCAGGCACGTCTTACATGGCT |
| | | | GGAGCCCGAGGAAGAGAAGAGTGGGGGGAGCACCACACACT |
| | | | TTTTAAAGAACCAGATCTCATGAGAACTCACTGTACAGTACCA |
| | | | AGGGGGAATGGTGCTAAACCATTAGAAACCACCTCCATGATC |
| | | | CAGTCACCTCCCAGCAGGCCCCACCTCCAGCGTTGGGGATTA |
| | | | CATTGTGAATGAGATTTAGGTGGAGACACACATCCAAACAATA |
| | | | TTACACTCAGATAGATAGATAGATAGATAGATAGATAGATAGAT |
| | | | AGATAGATAGATAGATAGATAGATAGATAAGATAGATAAGATA |
| | | | GATTGATTAGATAGATTAGATAGATAGATAGATAGATAGATAGA |
| | | | TTAGATATTCCAAACCCCAAAAAATAGCAAAATCATTCGAAGAG |
| | | | AGGCCTAAATATATAGAAGACTTTAGGAGAAAAAAAGCTAACA |
| | | | GAATGGGAGGAGAGGAATTGAAGACAATAAATAGAGACAGCC |
| | | | TTTGAAGAGAATTGCTTTCATAAGGATAAGCGTTGAATTGGATT |
| | | | CGTATATGGAGAGGATGAAGTCAAGACAGAGGATCCTTTTTTG |
| | | | ATTGAAAGATAGATGCATGTGTTTGTATGCTGAAGGGAAAGGC |
| | | | TTAGTAGATACAGAAGATTTGCCTCTGCAAGGGACAAGAGAGA |
| | | | GAGTTGTAAGGTCCCCAGGGAGGGTGAGAGCCACCACAAAAA |
| | | | TGGAAGCGGGTTAGCCTTAGATAACAGTGCAGAGGATTTCAT |
| | | | GGGCAGTAAACGAGGACAAGGAGAGTATAAGGATACAGATAT |
| | | | GGGTAGATGGATAGATATGGCAGCAAGAGAAATTCTCTTCTGA |
| | | | TTGCTTTGCTTTTCTCAGTGAATTAGTCAAGATATCAAGTACAT |
| | | | TATCAGAGTAGAAGAATGTTCTAAAGTTTTGTAAATGTAGAAAT |
| | | | CCATTACAGCTATATTAAGACTAATATTCAAAGGAAAGAAGCAA |
| | | | GATACAGGGGAAATGTGACAAGTATGCCTAATAAAAGCTTATT |
| | | | ATATAGAACATTTTTATCACTTCTCTATGTTCTAAGATGGTAACA |
| | | | GTGAGACTACAAGTAAATAATCCATAGAGATAAATTGTTACTCG |
| | | | AAGAAAACTGATAGTAAGTTTTCACATGGGAAAATGTTGTCTTA |
| | | | CCAGCAATCCAAAAAATGAGAATTAAGGCAACTTGAACACAAA |
| | | | AAGTAGGCTAAAACATATAGTTAGCAATACTGTGCATAGAGAC |
| | | | GTTTAAACATTACTGGTTGCTAGGCATATCAAGCCCATTTTTCT |
| | | | ATAAATCAGTCGGGATATTTAACAAAATGCAAAATTGCTGTACT |
| | | | TTTAAATTCTACCTCTAAAATTTTATCACAAAGATAATCCACCC |
| | | | CAGAATTTAAATTGTGGCTAAACAAATTATAACAGTGCTATTAT |
| | | | TAACATAAGAATCCAAATAAAAAGATGCAAAAAAAAAAACATGG |
| | | | AGTAACCTGGTAACCTTTGAATAGTTTAAATTTTCTTCTCCATTT |
| | | | ATTTTTCTGCTAGGCTGATTAAGTTTAGCTTAAGTCATAGTGAG |
| | | | ATTTACTTAGTTGTCACAGACCGTTTCTCAGATAGTGGGACCA |
| | | | GTGAGTTTTAAAGGTGTTTGTTCTGTGTTAATTGCTCCAGTATC |
| | | | TTCAATTCAGAAGAATAAATGTTTGATATTCAGGCTGCTATAGT |
| | | | TCACAAATGGATTTTATTGATGACTTACAGCATTTTAAGTGAAT |
| | | | AGAGCACATGTCTATTAAGTAATATTATTAAGTTCAGGAAGCTT |
| | | | GCTTAACTGCCATTGACAATAAGATGTAGGGTGGTTTAAAAAG |
| | | | GCAGAAAACCAAATGACTTAACACACCTTGACAACTGTTCATA |
| | | | AATTTTCAAAGACATCGCTTCTAGTAGTCACTAAAAGCTGTAGT |
| | | | AGATGTATGACTTGCTTTTCAAATGAATCAATTATTGCTTGAGA |
| | | | AGAATACACTTGTTCCTATTCTCCCATCTAAAAAATAATTTGAA |
| | | | ATAGCAGCCATGAAATATTTACAAAAACATAAAGAGAAAAGAC |
| | | | ACATGATGGCAGTTTATTTTCATGTGGAATTTCCCATGCTATTA |
| | | | ATTTTCCTAAGTCTCGACCTTTTGTGGGTGA |
| 323 | R3HDM1 | 2507469 | CAGGAGCATCAGAGACATCTTTGTG |
| 324 | R3HDM1 | 2507470 | GGTATATATACCCTCACCACAAAAAATATATATAAAATGGAAAT |
| | | | TACTATGACTTTGAGAAAGCTTATGAGGCAGAAAGTTGGTGTT |
| | | | TTCTTCCAGAGACTACAAGCCTAGTTGAGCATCTGACCTGCAA |
| | | | ATGAATTGGTTATT |
| 325 | R3HDM1 | 2507471 | TCTTCAGTAGGTTACCTGCAACATCCAGGATCAGAACAAGTAC |
| | | | AATTTCCTCGAACCACTTCACCATGCAGTTCCCAGCAGCTTCA |
| | | | AGGCCACCAATGT |
| 326 | R3HDM1 | 2507472 | TGATGATGCAGCTCAGTGTACCAAACAATCCACAATCTTGTGC |
| | | | CCACTCACCCCCGCAGTGGAAACAAAACAAATATTACTGTGAT |
| | | | CACCAGAG |
| 327 | R3HDM1 | 2507473 | TGATACCTGATACCAGTGGGACATTTTACTTGACAAATTGGCC |
| | | | CTGTTACTTGAATAGATGGCATTTTGAAATAGGAGCTTGGTCT |
| | | | GTTATACATTAAAAGAGACTCAAGAGGTATAATATCAGATATAA |
| | | | TGTATGGATCTTATTTGGATATTGAATGATCAAAAGACATTTTTT |
| | | | AAGGCCAGGCGCAGTGGCTCATGCCTGTAATCCCAGCACTTT |
| | | | GGGAAGCTAAGGCAGACCTGGAACGCAGGAGTTCGAGACCA |
| | | | GCCTGGGTAACATGGTGAAACCCTGTCTCTATAAAAAATACAA |
| | | | AAAATTATTCGGCCATGGCAGTGTGCA |
| 328 | R3HDM1 | 2507474 | GGCCATCTTGGCTATGCCAGAAAGTAAGGAAGGGATGGAAGA |
| | | | AAAATAGGGACGTCTTGAAGAATACAGGATCAGGAGTGGAGG |
| | | | TTTGGGGCATAAAACAATGATAGAAATGAATGATCATCCATAG |
| | | | AATAAAATAAGAATTCATGAGTCCATACTGATAAAAATCAATAA |
| | | | ATGGAAAATGAAACTGTCTTACCTTAGTGTAATATAAAGTGATA |
| | | | AATGTAGAATCGTGAAATTAAAAGATCACCACCAAGAAAACCA |
| | | | TCAGGCAAGAGTCACCACTAGAGGCTACAAAA |
| 329 | R3HDM1 | 2507475 | AGCCCTCAACTCAGTAGCCCCATTATTTCACCAGCTCAGTCGC |
| | | | CAGCACCAGCTCAGCTGTCCACCCTGAAAACTGTACGTCCCT |
| | | | CTGGACCACCACTTTCCATCATGCCCCAATTTTCTAGAC |
| 330 | R3HDM1 | 2507476 | GAGATTCCAGGTATCCATTACTTGGCCAGCCACTGCAGTACAA |
| | | | TCCTCCTGCTGTTCTGCACGGACACATT |
| 331 | R3HDM1 | 2507477 | AAGACAACTAACCTCCTAGGCTTTGTTGCAGAACATCATAGCT |
| | | | CCCTCAGAGT |
| 332 | R3HDM1 | 2507478 | TGAAGGACAGGAATGCCACTGCCACAGGCAGAATCCAGAAGG |
| | | | CCTGGGACTGATTTTCTTCTGCCAGAGTGCAAAACCCAAACTA |
| 333 | R3HDM1 | 2507479 | CATTATTAACGTTGTTTCTCAACTATTTGTGGGTTTTCAG |
| 334 | R3HDM1 | 2507480 | GAAGGAGACAAGCTAAAAAAGCTGCATCCA |
| 335 | R3HDM1 | 2507481 | GAAGGTCTTGGAAATTACTGAACTACCAGATGGAATAACTCGC |
| | | | ATGGAAGCTGAAAAGCTTTTTGGGGAACTCTTTAAAATTGGCG |
| | | | CCAAGATCCGGTGGCTCCGGGACCCCCAGTCCCAACCACGTC |
| | | | GTCACCCCCTCTGCTGTGGCAGTGGGGACAACACTGCCAACC |
| | | | CTGAACGCTCTAAACCCAGTGACTTG |
| 336 | R3HDM1 | 2507482 | GACTCCTAGGATGTGTGTTCATGGCATTATAGCTTTTGAAGAA |
| | | | AGGCCAGTGATCCAGCAAAGGGGGAAAAATATGCATTTCACC |
| | | | CCACATGACTAGGAATCCACATCAGAATGATACAGAGTTAGCA |
| | | | GGTTTTTCTAAGGAAATGCCATTCAAATGCCTCCTAACTTTTAT |
| | | | AGTTATTTTGTTTTATATTTCTAAATTCTTGTATCAGATCCAAAG |
| | | | CTCTATTGTACAGCAAATTATTCTTCAAAATGATTATAACCAGTT |
| | | | GCACCCTGTATTTCTTTTTGCAGCCAGCACAATGTGACCCAAC |
| | | | TTAAAATTTGGGGGAAAAAGAATGCAGGAGTGAAATAACCAAG |
| | | | TCAAAACCATGTACTATCTCCTTGGGGGTTAGGGATGCTAAGA |
| | | | AGAGCCCACAAATAGAGGATTACTCTTCCCCTGAATCTCTAAA |
| | | | CTCAGAAACAATTACCAAAAAATACATAACTCTTCCTTGTAGGG |
| | | | CCCTTTCCTTATTCATTTAGGTAGTGTGAACATTAAGTATAAAA |
| | | | TAAATTATGTTCTTAATGCCTCTTAAACCACTTACATTCAAAGG |
| | | | GGAACAGAAATCATTCTAAGCAGGAAAATACTTCCACTTTTTTT |
| | | | TTTTCAAGTATCTCTCTAATAACTAAATGCCACTTATTTGCATTC |
| | | | TCCTTGTGGATTTTTTGTCACCTAAGGAAATGCATTTGATGAGT |
| | | | GCTGGAAACTTCTTAAGTGCTTTACAGTTTGTTTTCATTGTTTG |
| | | | CAGCGGATCACTGGACATCAAAGATTCATTGCACTTATGAACA |
| | | | AGGAACCTTCTTTTCAATTTCTGTGTAATTTGCAAGGCTGTACA |
| | | | ATGTGTGCTGATGCAAGCC |
| 337 | R3HDM1 | 2507483 | TCAGTTCAAGAGAATAAATGTTTAC |
| 338 | R3HDM1 | 2507485 | ATCTTCACTGCTGTTCAACATTATAATGGAGGTATTAACCAATA |
| | | | TAGTTAGATACATCGATTTAAGGCATAAGAATGGGTAAAGAAG |
| | | | AAAGACTATCTCTGCAGATTATATGATAACGGGTTGAGCATCC |
| | | | CTAATCTGAAAGGCTCCAAAATTCAAAACTTTTTAAGCAGTCAC |
| | | | ACGATGCACAAAGTAAA |
| 339 | R3HDM1 | 2507486 | AGGTACAGTAGTTTCTTGTTGGAATAA |
| 340 | R3HDM1 | 2507488 | TTGTTGAGAAAAGGTTACCCTCTGACAC |
| 341 | R3HDM1 | 2507489 | GCCTAGACAACATAATGAGATTCCATCTCTATAAAAAAATTAAA |
| | | | AATTAGCCAGGTGTGGTGGTATACACCTGTAGCGCT |
| 342 | R3HDM1 | 2507491 | TGACTCTCCGGGTCACGACGTTAACCAAAAAATAAGACAAAAA |
| | | | GAGAATATATTCTATATGATTCTAATTATATGAAATCCAGCTGC |
| | | | AGACAAACTAATCTGTTATGTTAAAAATCAGATAGTAGTAGAGA |
| | | | TGGGGTGTGGAACTGACTGGGAAGGGACTGGAGGGAACTCTT |
| | | | CCAGGGATGGAAATGTTCTTTAAGGGGGTGGGGGAACAGGGT |
| | | | ATGGTTACACGGACTTTTACAGTTGTTAGAATTCATCAGATTCA |
| | | | ACACTTAGAATGTTTATTTTATTGATTGTATTGTATGTTAATTAT |
| | | | ATCTCAATTTCCTTAAAAACTTACACACACACATATGCATGAGT |
| | | | CAGCCCACACATGTAGAAGA |
| 343 | R3HDM1 | 2507492 | ACAGTCTGGTATGAATGCCGCAGGAGGAACACCTAGCCCAGC |
| | | | CTATTAGGAGGGGTCTTTGTACTGCTGACTATAATCTTATCTC |
| 344 | ACO20571.3 | 2521178 | AAGGCAACTGGTCTGATTTTTCAGGTAAGAACATATGAGAGGC |
| | | | AGGCTGAGACCAATTTTCTACCAGGCCAGCTAATTCATCACAA |
| | | | TGACAAGCTATGGGTCATATGCTTTCAGGAACCAGACACTGGA |
| | | | ACATGTCGTCTGATGTAC |
| 345 | ACO20571.3 | 2521179 | GAATCCAATGGGGAGTAAGAGAAAGTCCCTTTTCAAGGAGCT |
| 346 | ACO20571.3 | 2521180 | CATGTGTTCGGAGACAACCAGAAGCAGCAATGCTCAAAACCA |
| | | | CAAAACTCTGGATTGCCGACTCTGCACATCCTGGTTCCTCTAG |
| | | | ATACAGTTCAGTGGCACATTCACAAATAAACGTTTTCAAAAACT |
| | | | GCCCTCAGGCAGTTCTAGAGAAATGCTTTGACTTGCCTAATGG |
| | | | TATAATGTCAAGAAAGGAAGACGAGCACTGATCATTCATACTC |
| | | | ATTATTACAGTCACAGGGCACTGTCTGACTTGACAGATACAGC |
| | | | CGAGCAGTTAAAAGGTTATGGGAATTTAAGTCCATTATGGTCA |
| | | | TACGATTCTTATGGACCCAGAGATATGAAATTAATCAGCCACA |
| | | | TGTGTAGGGACAAAGTT |
| 347 | ANO7 | 2536218 | CCCGTTTTGCCAGCCCAAGACTAGGAGCCACGGCACCTGTCC |
| | | | T |
| 348 | ANO7 | 2536219 | CGGGCACTCACTGGATGGACAGACAGACGCCTGCTGTGCCA |
| | | | GGCCTGCCAGACGCTCCCGCCCCGGCACTGGTTTCTTCCTGG |
| | | | AGCTCGTGGCTGGCTAGGGGGTTCTCCATGTGCTCATGGCCA |
| | | | GGAGAGTCTGCCGAGCCAGCCCAGCCCCATTCTACTCCGAGT |
| | | | CGAGTCTGTA |
| 349 | ANO7 | 2536220 | ATGCTGCGGCGACGGGCCCAGGAAGAGGACAGCACCGTCCT |
| | | | GATCGATGTGAGCCCCCCTGAGGCAGAGAAGAGGGGCTCTTA |
| | | | CGGGAGCACAGCCCACG |
| 350 | ANO7 | 2536221 | CCAGGTGGACAGCAAGCGGCCGCCTGCAGAGCTGGGAGTCC |
| | | | TGCCAAGCCCCGGATC |
| 351 | ANO7 | 2536222 | CTGAAGCTAGACAGGCAGCAGGACAGTGCCGCCCGGGACAG |
| | | | AACAGACATGCACAGGACCTGGCGGGAGACTTTTCTGGATAA |
| | | | TCTTCGTGCGGCTGG |
| 352 | ANO7 | 2536223 | TGACCCATGACCTTGCCGCATGAGGCCTGAGGGCATGGTGTC |
| | | | CAGAGTCCCAGAGCAGATCAGGCCCCAAAGTCCTGCTGGACC |
| | | | CCCCAGCCACCGTGAGCTCCTCCGTGTGGCTAGGGAGCTGCT |
| | | | GTCCAGAGGCGGAGGTAAACATTGATCCCTCCTGCACACTCA |
| | | | GCTCTCTCATGGAAGTCGGAGCCCTCAGGGTCACCTGAAAAC |
| | | | TCT |
| 353 | ANO7 | 2536224 | TTGCCATTCACCTGTCCCGTCTCCAACATTAAAGCTT |
| 354 | ANO7 | 2536225 | TGTCGAGGCCCGGTTGGCTTTCAGAGGCGTATCCATGGGAGT |
| | | | AGGTGTCATGTATCAAATAGGAGATTCAAAGTCAGCTGTTACC |
| | | | ACGGCTACAGAAATGCCAGTCTTTTCCTAAGAGTGCGAA |
| 355 | ANO7 | 2536226 | AGGACGGGAACACCACAGTGCACTACGCCCTCCTCAGCGCCT |
| | | | CCTGGGCTGTGCTCTGCTACTACGCCGAAGACCTGCGCCTGA |
| | | | AGC |
| 356 | ANO7 | 2536227 | AGTTACCCAACCAGGCCTCCAACTGGTCGGCCGGCCTGCTGG |
| | | | CATGGCTGGGCATCCCCAACGTCCTGCTGGAGGTTGTGCCAG |
| | | | ACGTACCCCCCGAGTACTACTCCTGCCGGTTCAGA |
| 357 | ANO7 | 2536228 | CTTCCTCGGGAGTGACAACCAGGACACCTTCTTCACAAG |
| 358 | ANO7 | 2536229 | TATGGCCACGAGAAGAAAAACCTGCTTGGGATCCACCAGCTG |
| | | | CTGGCAGAGGGTGTCCTCAGTGC |
| 359 | ANO7 | 2536230 | TTCAAGACGCCCCCAGAGGGCCCGCAG |
| 360 | ANO7 | 2536231 | GCTCCACGCCTCAACCAGCGCCAAGTCCTTTTCCAGCACTGG |
| | | | GCGCGCTGGGGCAAGTGGAACAAGTACCAGCCCCTGGACCA |
| | | | CGTGCGCAGGTACTTCGGGGAGAAGGTGGCCCTCTACTTCGC |
| | | | CTG |
| 361 | ANO7 | 2536232 | CTTCCTGGTGTTCTCAGACATACCC |
| 362 | ANO7 | 2536233 | GGCAGCAAGGACAGCTTCGAGATGTGCCCACTTTGCCTCGAC |
| | | | TGCCCTTTCTGGCTG |
| 363 | ANO7 | 2536234 | CCGGCTGTTCGACCACGGCGGCACCGTGTT |
| 364 | ANO7 | 2536235 | CTGCTGGAGTACTGGAAGCGGAAGAGCGCCACGCTGGCCTA |
| | | | CCGCTGGGACTGCTCTGACTACGAG |
| 365 | ANO7 | 2536236 | CGAACCCCATCACGGGTGAGGACGAGCCCTACTTCCCTGAGA |
| | | | GGAGCCGCGCGCGCCGCATGCTGGCCGGCTCTGTGGTGATC |
| | | | GTGGT |
| 366 | ANO7 | 2536237 | TGTGCCTCGTGTCTATCATCCTGTACCGTGCCATCATGGCCAT |
| | | | CGTGGTGTCCAGGTCGGGCAACACCCTTCTCGCAG |
| 367 | ANO7 | 2536238 | CATCGCCAGCCTCACGGGGTCTGTAGTGAACCTCGTCTTCAT |
| | | | CCTCATCCTCTCCAAGATCTATGTATCCCTGGCCCACG |
| 368 | ANO7 | 2536239 | GCCAGAACGTGACTTTCTCACTCACTGACACACATGGCCCTCA |
| | | | TTTCTATT |
| 369 | ANO7 | 2536240 | AAATGCACCGCACCCAGACCAAGTTCGAGGACGCCTTCACCC |
| | | | TCAAGGTGTTCATCTTCCAGTTCGTCAACTTCTACTCCTCACCC |
| | | | GTCTACATTG |
| 370 | ANO7 | 2536241 | CCAGGCAACTACCACACCTTGTTTGGAGTCCGCAATGAGGAG |
| 371 | ANO7 | 2536242 | TCTTCCATTCGAGCTTTGATTTGCAGCAATTCCTCCCACCACC |
| | | | GGCTATTTCCATCGCCCAGCCAGGG |
| 372 | ANO7 | 2536243 | TGGAGGCTGCCTGATCGAGCTGGCACAGGAGCTCCTGGTCAT |
| | | | CATGGTGGGCAAGCAGGTCATCAACAACATGCAGGAGGTCCT |
| | | | CATCC |
| 373 | ANO7 | 2536244 | TGGTGGCAGAAGTTCCGGCTTCGCTCCAAGAAGAGGAAGGCG |
| | | | GGAGCTTCTGCAGGGGCTAGCCAGGGGCCC |
| 374 | ANO7 | 2536245 | TGTGAGGGTCTGTTTGACGAGTACCTGGAAATGG |
| 375 | ANO7 | 2536246 | GAGCAGGTTTCTGCCCCAACGCCTGCCCTGAGTTAGTTCCTG |
| | | | AGCTCACCGAGCCGGAGAAGGCCCGTGACCAGCCAGAAGCA |
| | | | CGGAGCGCAGGGC |
| 376 | ANO7 | 2536247 | TGAGGGCGGACGGTGGCGGAGAGCCCGGCCGTGACCC |
| 377 | ANO7 | 2536248 | CTGCAGTTCGGCTTCGTCACCATCTTCGTGGCCGCCTGTCCG |
| | | | CTCGCGCCGCTCTTCGCCCTGCTCAACAACTGGGTGGAGATC |
| | | | CGCTTGGACGCGCGCAAGTTCGTCTGCGAGTACCGGCGCCC |
| | | | GGTGGCCGAGCGCGCCCAGGACATCGGCATCTGGTTCCACAT |
| | | | CCTGGCGGGCCTCACGCACCTGGCGGTCATCAGCAA |
| 378 | ANO7 | 2536249 | CTTCTCGTCCGACTTCCTGCCGCGCGCCTACTACCGGTGGAC |
| | | | CCGCGCCCACGACCTGCGCGGCTTCCTCAACTTCACGCTGGC |
| | | | GCGAGCCCCGTCCTCCTTCGCCGCCGCGCACAACCGCACGT |
| | | | GCA |
| 379 | ANO7 | 2536250 | AGAGTATCCTGTTTGGGAAGAATTCCCATTTCAGGCACCCTCG |
| | | | ATGAAGAGCCAGGCCAGGAACATGGGATGAGAGAGCGAAATG |
| | | | GTGGAAAAAGGGGAGATAGGCTAATTCCAGA |
| 380 | ANO7 | 2536251 | CCTGGCTGCGCGCACTGAGTCCTGTGTCTGCTG |
| 381 | ANO7 | 2536252 | GTATCGGGCTTTCCGGGATGACGATGGACATTATTCCCAGAC |
| | | | CTACTGGA |
| 382 | ANO7 | 2536253 | TCCCATCCATGGCATGAGGCCCCGACCCTGTGCTTTGCCTAAT |
| | | | TCGAGCACGTG |
| 383 | ANO7 | 2536254 | TTGGTCAAATCAGAGCTCTTCTCTGCACCTGCGTTTTCCCTGC |
| | | | CTGGCCTCATCCCTGGGTTGTGGTGTGGACATTGTGGGTGTC |
| | | | TCCACAGGAGCCCCAGGGCCACGAAAGCTGGGGTGGC |
| 384 | ANO7 | 2536255 | CTGGCCCTGTGAAGGCCACTCTGGGCGTTTGGGTG |
| 385 | ANO7 | 2536256 | ATGTGGTTTTCTCCGTTGGCCGCCTCCTGGACCTCCTGGTGC |
| | | | CTGACATCCCAGAGTCTGTGGAGATCAAAGTGAAGCGGGAGT |
| | | | ACTACCTGGCTAAGCAGGCACTGGCTGA |
| 386 | ANO7 | 2536257 | TGAACTGTACAGCCCAGTCTCGGCCCTCCCCCCAGCCCTCTC |
| | | | CCTATCCTTGTCAGTGGCTGCTCTACCTCCGGACACTGAGTCA |
| | | | CAT |
| 387 | ANO7 | 2536258 | ACGGAACAAAGGATGAGCAGCCCGAGGG |
| 388 | ANO7 | 2536259 | CGTGCACTCCCTGAGGTCACAGGGCCCTGCCCAGCCGCCCA |
| | | | CTGTGCCTCGTGGCCATGGCCTGCTCCTGGCCCTAGTCTGAC |
| | | | TTGTCCCTGC |
| 389 | ANO7 | 2536260 | GCTCCCACTGGACACCCTTCACGGTTCCCAAGGCCAGCCAGC |
| | | | TGCAGCAGTGACGCCTGGAAGGACATCTGGTGGTCCTTAGGG |
| | | | GAGTGGCCCCTCCTGAGCCCTGCGAGCAGCGTCCTTTTCCTC |
| | | | TTC |
| 390 | ANO7 | 2536261 | TGTGTGAACCGCTGGCTGCTGTTGTGCCTCATCTCTGGGCAC |
| | | | ATTGCCTGCTTCCCCCCAGCGCCGGCTTCTCTCCTCAGAGCG |
| | | | CCTGTCACTCCATCCC |
| 391 | ANO7 | 2536262 | TTCGAATGTTTCAGAGCGCAGGGCCGTTCTCCCTCGTGTCCTC |
| | | | TGGACCCACCCGCCCCTTCCTGCCCTGTTTGCGCAGGGACAT |
| | | | CACCCACATGCCCCAGCTCTCGGACCCTGCAGCTCTGTGTCC |
| | | | CAGGCCACAGCAAAGGTCTGTTGAACCCCTCCCTCCATTCCC |
| | | | AGTTATCTGGGTCCTCTGGATTCTTCTGTTTCTTGAATCAGGCT |
| | | | CTGCTTTCCCCCTAGCCACTACAGGCAGCCTCTGACAGTGCC |
| | | | GCTTTACTTGCATTCTGCAGCAATTACATGTGTCCTTTTGATCC |
| | | | TTGCCCAACTTCCCTCCCTCTCCCAGCTCCTGGCCCCTGGCC |
| | | | CAGGGCCCCTCTTGCTGTTTTTACCTCTGTTCCTTGGGGCCTA |
| | | | GTACCCAGCAAGCACCCAAATGGGGGAGGTTTTGGGATGAGA |
| | | | GGAGGAAACGTGTATACCTGTAACATCTGGTGGCTCTTCCCCC |
| | | | AGAAGTTTGTGTTCATACATAATTGTTTTCCACGCTGGATCATA |
| | | | ATGTGACGTGCAGTTCTGCCCTGTGCTGGGGAGCCACATGAA |
| | | | GCTTCCCCTGGCTAACTTGCTACCCCGCAGCAATCCCAGTGT |
| | | | GGCCGTCTGCTTGCTAAAAAATG |
| 392 | FTH1P2 | 2545844 | TCACTACTGGAACTGCACAAACTGGCCACTGACAAAAATGACC |
| | | | C |
| 393 | MIR4435- | 2570866 | GGAAGTCCAGCCTTACCAACTTGTGAACCTTGTCTGAAGGGA |
| | 1HG | | GCCAGGGCCTGCCAATGGAACCACCTCCAGGAGCTGCAACTG |
| | | | CTGTTGTCATTAATACCATTGTGTCTATTTTTTGAGAGAGATAA |
| | | | ACTTTTCATGGTGTTACATTTTGGAAAAAAAAAAAAAAGACTAG |
| | | | GTGAACAGTCAGGTAGGAAAGCAGCATAACAGTCCCTTAAATT |
| | | | CTGATCATGTAGGACATTCTTCTTTGCCCTGGGCCTGGGAAAA |
| | | | TGCAGCATGTTCCAGAGCAAAAGTCCTAATGAGGGGAACTAAA |
| | | | CCAGTGGGACCCAAACCAATGTCCTGGCTCACTGAGGACCCG |
| | | | TTAGAACCAAATCTCTGGGTGTGGACAGGCTCCCATACTTTTC |
| | | | AAAAATTCCCCTGATGACTAATGAACAACCAGAGGTAAGAACC |
| | | | AGTGGCCCAGAGGAATAACCAGCCCAGCTGTTGTACGAGCTC |
| | | | GCTAAGCTGGCTCAGGTCAATGTTGAATTCTCTGCTAGGCAGC |
| | | | TCCTCATAAGAACTGGCAGAGATGGTTCTTACACAACAACAGG |
| | | | TGACAACTCCAGACTCTGCCGGAAGTTCCAGGATCTGGGTTC |
| | | | CCGGACAATGCATGACAC |
| 394 | MIR4435- | 2570867 | GGTTATCTTTCCTCCACTCGAGGGATTGAAGCTAGGCTGTCCC |
| | 1HG | | ACGGCACCGGGCTCGTGGC |
| 395 | MIR4435- | 2570868 | CAAAGCCACGCATGCAGAGAGGTTACCAGTGTCCATCCAGAC |
| | 1HG | | GCCCACTTCACAGACAGGTAGCCAAGCGCCAGAGCCCGGCTA |
| | | | TTGTAGCCCTAAGTG |
| 396 | MIR4435- | 2570869 | ACATTCTGGATGAAAGAAACTACTCAAAAAGAATGTTTACTGTA |
| | 1HG | | TGATTCCATTTTTATGTTTAAGAACAGGTAAAATTAACCTGTGA |
| | | | TGACAGACATCAGAGTCATGGTTACTCCTGAGGAGAGGGGTT |
| | | | TACTAGATGGGACA |
| 397 | MIR4435- | 2570870 | CCTCTCAGATCACCCAGGAATTCTACTCCTAGGTTTTTCTCAA |
| | 1HG | | GGAGAAGTTAAGTGCAAATATCCATCAAAATGCTCATAAATTTT |
| | | | ATTTGTAATAGCTAAAAACAAGACACAACTCAAATACCTATTAA |
| | | | ATGTTTATCTAGACACAATCCAAATGTAATACAGTCATGCTCTG |
| | | | CACAATCATGGTCCCATGAAATTATAATGGAAGGAAAAATTCC |
| | | | TATCACCCAAGTGCACACTGTTTATAAAGTCCACAGCGGTGT |
| 398 | MIR4435- | 2570871 | GCACAAATGGTATTCTGTATCTGAAAATTGTTTGGATTAACTTT |
| | 1HG | | TGATTCTTGCCTGGTTAAAGAATTACAATTCTTACCTCAGATCA |
| | | | TGCTTAAACTATC |
| 399 | MIR4435- | 2570872 | TCTGGAAATGTAACTACTATAATGGACCTTACAAATGCACAAAT |
| | 1HG | | GGGGCCGGGT |
| 400 | MIR4435- | 2570873 | GCGAGTGTTCTCATTGCATTCGTGACCCCATTGATCTTGCAAC |
| | 1HG | | AGCCCCATGCATCAGTTATTGCCATTATACCATTTTACCGATAA |
| | | | GGAAACTGTGGCAGGGAGGGGTCAAGCACCTTGGGTATTTGA |
| | | | CAGCAAAACCAAGGCTTGGTGGTATCATAAAACTTCCAAGTAG |
| | | | TAATTCACAAAGGTGACTGGGAAATGGAAGTGACCAGAAATCT |
| | | | TTGCACTATGAGGACAAGTTCATGACCCTGATACATTCTTGTC |
| | | | CAGGTAGTATAGCTCCAGA |
| 401 | MIR4435- | 2570874 | CTACTGCATTTCTGTCACTCGCTGAAAAGGACACTCTGTCAGA |
| | 1HG | | AAATCTTCTAGCAAACTTCAAAGGGCAAAATCACCCCTTGTTA |
| | | | CTGATAAAGCCCAGAGAGCTTCAGCAGCTAACATTCCCTGGA |
| | | | CAGGGCACAGCAAGGATTTGAACCTAGGTCAGTCTGGCCAGA |
| | | | ACACCCACAAGCTTTCCTTAACTCAGTGTGCTATCTCCCCACG |
| | | | ACTAGGTCACTACTGCTTTATAATCACCTTTGTAGCCACCAGT |
| | | | GGATTTTGCTCATCAGTATTTTTCAGGCAATTGATACTTTAGAT |
| | | | ATTCAGCTGCAAGACGTATGCAGTTTTCATTGACATCTTTTGGA |
| | | | GAAACTGACAAACCTGGACTTGACTTAATGCCTTTGGAACCTT |
| | | | CCAAGATGTTATATAACTCTAGATAGAAGGCTGGGCCTCCATG |
| | | | ATGTCAGGAATGTTGCATTCTTATTTCCCCATAGATAAACCCAT |
| | | | TTGTCCACAAAGTCAAGGAGTCAGGCAGAGGCCCTTGCCATG |
| | | | GGGCTTTTTAGGATAAAGCAACAAGCCTGGACTTTGCTCTACA |
| | | | ACAGGGTTTTGCATAGGGAGTGGTATGACCAGATCCCTCAAG |
| | | | AA |
| 402 | MIR4435- | 2570875 | GGTGGGATCACTCAGATTCTACAGATATTAAAAGGATAATAAG |
| | 1HG | | GAAGTATTGTAAACTTTTATGCCTATAAATTTTAAAACTTAGATA |
| | | | AAATGGATAAATTCCTGGCAAGGCACAATCTACCAGAGCCCAC |
| | | | TCAAAAAGAAAGAAAGAACCCAGACAATCCTCTATTTACGGAA |
| | | | TAAATTGAATGTTTAGTTTAAAATGTATGCATGAAGAAAATTCC |
| | | | CGGTTGACATGGCTTCACTAGTG |
| 403 | MIR4435- | 2570876 | CAATAATATAAAGGTCAGAAGGGGAGAAATGGAAGTATCCTGT |
| | 1HG | | TGTAAGTTTCTTATGCTATACGCGAACTGGTATAATATCATTTG |
| | | | AAGGTAGGCTATAATAAGTTAAAGATGTGTTCTGTTAATCCTAA |
| | | | GAAATATGAAAATAACACAATAACAAAGAGTTACAGCAAATAAG |
| | | | ACAACAAAAGAGATAAAGTTGGATCATAAAAATA |
| 404 | MIR4435- | 2570877 | CAAAGGTTTCTGCTCAAGGGTTTCTGCTGCAGTAATTTGTGAT |
| | 1HG | | TCTAAGTATTTTCTTGTCAGTCTTTCCAATTTAAGGGGCAGTAA |
| | | | ACCTCACTTCTCTGATGGATCTAAGAGTTGTTAATTAATCAGTT |
| | | | TGTTCAGCCTTTTATTTGTTGTTAGGATGTAGTGACAACTTCCA |
| | | | AGCTCCTTACGTACTGGATTGCAAACCAGAAGTCAAACTATTC |
| | | | CTTAGAAATGAAGGGGAAGTAAAGTCATTTTCAGATGACAGGA |
| | | | TACTAAAAGAATATGTCACCAGAAGACTTGCCCTTAAGGAATG |
| | | | ACTAAAGCA |
| 405 | MIR4435- | 2570878 | GCCACTGCTTTGCTGAGTCATTCTACTATGCAGCCCCTCAGAC |
| | 1HG | | ACAAAGCCCGGCGGCCACCTGCCCACAGAGGCACAGAGGGC |
| | | | CAGCCAACTGCAAGCACGGAACTTCAGGATCTTGCTTTTCGG |
| | | | GTTATTTTCACTACTGTAATTTTTTTGTCCTTAGGTAAAAAGGAT |
| | | | AATAATTGTGGAAAATTATGTCCTTAGGTTAAAAAGATCCTGGA |
| | | | TCATGCCAGATATTAAAATATGGATAAAATTGGCATGATCTTGG |
| | | | AATCTGAACAGAAAAGAAGCTGCTTTTAGCTGTTTTCAACTGTT |
| | | | TTTAGCTTTTCTGTCTAAACAGCTGTTTA |
| 406 | MIR4435- | 2570879 | CTTAGCTGACATTACTTTGATCATGAACTTTGTTGCCT |
| | 1HG | | |
| 407 | MIR4435- | 2570880 | TCGCTGGGGTATGACCATTCCCCTGGCCTTCCTATCTTCCCAT |
| | 1HG | | CTATGCCCAACATGGCTGCCAAGGGGATCTGTCCTAAATGCA |
| | | | AAGTTAGCCATGCCTGCCC |
| 408 | MIR4435- | 2570881 | GGGGAGGATAAAATTTGGAGCAAGATTCTCAAGGAAGCAACA |
| | 1HG | | AGATCCTAAG |
| 409 | MIR4435- | 2570882 | TCTTGGACGAGCCTGAGGATGTCTACAAGTGGAAGAA |
| | 1HG | | |
| 410 | MIR4435- | 2570883 | TGGAGGAGGATCCAAGGCTCAGAAAGAGAAGGAG |
| | 1HG | | |
| 411 | MIR4435- | 2570884 | TGCCTATTGTTCTGGATCATTTTGAGAAAAAAAAAGAGATACCT |
| | 1HG | | TGAAGAAAGATGAAGACAAAATATGGAAGGGTGCTGAATTTAC |
| | | | AAAAAGCCTAAGGGGAAAAAACTCAAATGTCCCTCAGGAGTG |
| | | | GAATGAGTAAACAAATCATGGCGTGTTCACACAATGGAATGCT |
| | | | ACCTACCAATAAAAAGGAATGAACTGCGGATGCACACAGAAAC |
| | | | ATGGGTGAATCCACTAGGCATCATGTTG |
| 412 | MIR4435- | 2570885 | CAGCCATTTGCAGAGCATTGGAGTAAGTTTTACCTTCATCCCT |
| | 1HG | | TAGATGTGAATTTGTTATCCTCACTGTGACAATCCCTTATCACA |
| | | | TGGCTTTTAGAAGGATTCTCAAAAAGCTAGACTCTCACATTCAA |
| | | | CTTTGCAATTGCCTGGCTGGGTGTTACGTTTCTTTGCCTCCTA |
| | | | TTAGAGACCCTATCAGCATCTAAAACTAGCGTTGTTTGAGGAT |
| | | | GTTGGAGCCAACGGTTCTTTGCCAGATAGAACTTTGTGTGTCC |
| | | | AAATAAATGGTTCAAAATCATCAAGCAAATAAATACCCTGGAAT |
| | | | AAGAGAAGCCTCATGAGGATTTGACTCCAAATTGACTTCCTCT |
| | | | GTTCTGCAGTAAGAAGTTAGGAATTAAACCAAACCTTGCCTGA |
| | | | GGTTCAGGTATACTCAAAAGCAATGAGGTGTGGCTCAGGTGT |
| | | | GCGCTGGCAAGGTCACTGTGAAGTTCAGCCAGAGGCTTTGCA |
| | | | AGCCTGGGCCTGAGAAGCCAGACCTCTTAGATCCAGAAGGGC |
| | | | CAATGGAGCTGGGCTGGCCTGCTGCCACTCACAGGCAGAGA |
| | | | CTCTGCCAGCAGAAGGGACTCTGCTGTCAGAGCTGGAGGGCA |
| | | | GCGGACCACATGGCTGAGGCCCAACCACAGGTCTCCTGACTC |
| | | | AAAACCTCTTCCCAGGGCTTGTCCTCCTCCCTAAATATATGTG |
| | | | CCCCAAATTGTCACCAGATCTCGGGAAAGCACTGGCTTT |
| 413 | MIR4435- | 2570886 | GAGGTAGACACTATTCCCAGCTGGATACTCTCAATGTTGAGGA |
| | 1HG | | TATAGATGCACAAACCAATGCAGGGAGGCCTCCAGGAGCCAC |
| | | | TGGAGAAGAAATCTTCAGATCCTACCAGGCCCATAGCTGTTGC |
| | | | CTTTGTGGGCTCCTGGGTTAATTTCCACACATCAGTGGCCCAC |
| | | | CTTATGATATCCTCCCTGCATGCCACACTCCCGGCCATGCTCT |
| | | | GTGGACAGCCATTATTTCCAGTAATTGCTAATGGGAGCCAGTC |
| | | | TCCAAAGAGTAATGAATCAGAGGTGTTCCTTGGAATGTGTTAC |
| | | | ACTAGGACTTCGCCGATCTCACAGGCTCCTTTCCAGATGAGCT |
| | | | GACTGTAATCTCTGGGAAGCTGGATCTGGAGGAACAATGGGA |
| | | | TGGGATTTGCGGTGACCCTTCCTGCCCTTCTTGAGCAGCTTGT |
| | | | GAACCAGAAGATGTGCCTGGAGAGAAAGCCTCATTTGGGGAA |
| | | | GTGCAGTAGTC |
| 414 | MIR4435- | 2570887 | CAGATCTCAGCTGCCGAGTGGAAACCCCATTCTCACACCATA |
| | 1HG | | GCTATGGGACTGGGGGAAAGGGGAGGAAATAACTAAAGAGTA |
| | | | AGGAATTGGGGGAGGCTTTGAGGTTTGGATGTGACAGGTAGT |
| | | | TTGCATGTAGTTGGAATGCAGTAACATTGGTCCACAAGGTT |
| 415 | MIR4435- | 2570888 | GAGCACGTGATCACTTCTCACAACTAATGGAGCCAAGATTCTG |
| | 1HG | | TCCTTATGGCTCCAGAGACCTCTTTTTTTTCCCACTGTACCACA |
| | | | ACACTCACCAGGACTGGAGTGCCACCTATGACCTCATTGCATA |
| | | | ATGGATGGCTTGTCCTCA |
| 416 | MIR4435- | 2570889 | TTAAAGATCTGTAGGCTTACTAGCCATGACAATGATGACAATA |
| | 1HG | | ATGATGATGAAAATGACATCATCATTACCAATAGCTACTGCCAT |
| | | | CTATTGATCCCATAACATGTGATCATATC |
| 417 | MIR4435- | 2570890 | AGTCATGTAGTTTGAGCACTCCAGATTTATTTTCCTAATTCAAG |
| | 1HG | | ATTGTTATAGATACGCTAGATTCTTTGCATGTCTATATAAATTTT |
| | | | AGAATCAATTTGTAAATTTCTACAACAGATTCCTGCTAGCATTA |
| | | | TTACTGGGATTGCAATAACTCTACAGATCAATTTGTGGAGAAC |
| | | | TGACATCTCAACAACATTGAGTCTTCCAATCTGCAAACATGATA |
| | | | CTGTGTGTGTGTGTGTGTGTGTGTGTGTGTGTGTGTGTGTGTG |
| | | | TCTTCTTTAATTTCTTTCAATAATTGTTTAGTTTTCAACATAGAG |
| | | | ATCTTGTCCATCTTTTGTTGTTTATTCATGAGTATTTTATGCTTT |
| | | | TTGAAGATACTGTAAATAAAATTGTTTTTCTAATTTCATTTCCCA |
| | | | AATTCTTGCTGCTGATATATAAAAGTATAATTGATATTTTAATAT |
| | | | TAACCTTGTATCCTGTGACCTTGTTCAATTGATGTA |
| 418 | MIR4435- | 2570891 | GCTCAGTTTGCTTATCCGTTCTCCTGTTGATGAACATCTGATGT |
| | 1HG | | TTGCAGTTCTCCTCTCCGTGAGTCTTCTTGTAAACATAATTTTC |
| | | | ATTTCTCTTGGGAAAAACCCTAGGAGTGGTACTGCTGGGTCAA |
| | | | GGGGGTAGGTGTTTGTATAGCTTTATAAGAAGTTACCACATCC |
| | | | TTACTAATATTTGGTGATAGCTATTCTTTAAGTTAAAAGTGTAG |
| | | | AGGCATCTCGTTGTGGTTTTAATTTTTATCTCCCAAATGAGTAA |
| | | | TGATAAGTGTCTCTTCATATACCGAATGGCTA |
| 419 | MIR4435- | 2570892 | CTTGCAGGCCCTGTGAACATATATACTTCCTGGTGGGAAGAGC |
| | 1HG | | AAGGGAGCCTCTGGTGGAAAGCAGCCCCAGGGTCCAAGAAC |
| | | | CACACAGCCCTGCATTAGGGCCCCCAGGGAGGGAGAAGACC |
| | | | AAGGTCATGCTTTTGAACCTGGATGCCAGAAGAGAACAGCTGT |
| | | | GGGGAAAAGCATGCCTGGAACCAAGAAAAACATGTTTACCAG |
| | | | GGGCCATTCCTCACACCAGCTGCAGGCAGGGTCAGGAAAGC |
| | | | CACAGGCTGCACTGTAGTTGCAACCTTGCATGCGGACGCAAG |
| | | | GCTCAGAATGTTCCTCAAAGATCCTAAAATGTTCCCAGAGTCA |
| | | | GGCTGAGTCCATTCA |
| 420 | MIR4435- | 2570893 | CACTACAACTGGCTGTCGGTCTCCC |
| | 1HG | | |
| 421 | MIR4435- | 2570894 | ATGTGATGGCCAAGGGAGCTTCATCAATCATGGCATCTCAAG |
| | 1HG | | GGAGCTGGAGCAGATGAGGAGGAGATGGAGGTCCCAGGAAG |
| | | | GGCTGTGATCTGCCTGGGGTCCCACAATGGGAAAC |
| 422 | MIR4435- | 2570895 | CTCACACAGGCAGTTAGCCAAGGCCTGATATGCAGAAAGTGC |
| | 1HG | | |
| 423 | MIR4435- | 2570896 | ACCCAGGGAGGATAGCACATGTCTTCGGCTACACTGGTGAAG |
| | 1HG | | GCATCGTGCCTGCTCCACAG |
| 424 | MIR4435- | 2570897 | TGCAGCTGATACCCAGGATGTATTATTATTACTGTGACACAGT |
| | 1HG | | GAATCTAAAAGAGG |
| 425 | MIR4435- | 2570898 | CTCAAGGGAGATTGTATGAGACTCCTATAGGGTAGAACCTACT |
| | 1HG | | CTGAAAGAACTCACCTCAATTAAGCTTGATTGGAGTAAAAGCC |
| | | | AAGGCTAGACACCTAAGCTTC |
| 426 | MIR4435- | 2570899 | CTCAGAAACCTGTAGATCTCTATGA |
| | 1HG | | |
| 427 | MIR4435- | 2570900 | CCCTAATGACTAATTGTTTTGAGCA |
| | 1HG | | |
| 428 | MIR4435- | 2570901 | TCCCTCATAATGTCTGCTCTGTGTCACTATGTACCCTCCCCTG |
| | 1HG | | TCCTCCATTCCCCACACCAAGAGTATTATGAGTATTAAATGCC |
| | | | ACGTGGGCAGGTTCCCCAGGCAATGAGGGGGTGGGCCTGTC |
| | | | AAATGCAGGCCATGCAGAATGCCGCAGGGCGGGAGACGGGT |
| | | | GAGCCAAGGGAGCCGAGAGTTCCAGATAACAGAGTGCACAGC |
| | | | AAATGCCATGGCCCGCGTCCAGCAACCAGGAGAAACAGAACT |
| | | | GCTGAGCTCAGAATAGGCCAAGGCCGC |
| 429 | MIR4435- | 2570902 | GAACTCCCACTGTATAATTGCTAAACACAATGACAGCTATAATT |
| | 1HG | | GAGGCACTGAAGGAAGGTCAGGGGAGCCCAGGAGGGCGGG |
| | | | GCTGCTGCTGCCTGCTGAGCTGGGAGGGTTGGTGGCACCCC |
| | | | TTGCCCTGGGTTGCCATAGCAGATATCATAATCAATTACGGCC |
| | | | GTCTTTCATGAGGAACCTGGATCTTTCCCAAGGAATC |
| 430 | MIR4435- | 2570903 | CTGCAGGCTGGAGGCTTAGCCACTTCTCAGGAGGAGCCTAGA |
| | 1HG | | AAGGATATTGGTCGCCCAGCTGCTGAACCTGCCCCAGCATCC |
| | | | TTGAGGGTCTTGAAAATCTATTTTATGCTGGGCACCTG |
| 431 | MIR4435- | 2570904 | ATGCACTATGTAGCCCATGAGAAGGAGACCAACTCCGAGGAG |
| | 1HG | | CTGAGAGTGAGAGGAGACTGCATTCTCAGACACAATTGTCCA |
| | | | GACACTTCCTTTAAAAACTACACGCCAATGCCCAATAATGCT |
| 432 | MIR4435- | 2570905 | CGGGACACATATGGGAATACAATTACAGCAAAGCCGGCAAGG |
| | 1HG | | CTCAGTGAGGGGCAGAGGGCCTGGCCACATGAGGAGCCAGT |
| | | | GCTGTGGGCAGGCCCGGGTCTGAGTGCTGGCTGTGTGTCCT |
| | | | GCACAACCACATCTCCCAGAGTGCATTCGTCACCATCCACTCC |
| | | | AGATGCCCCTTGAACAAATGAATTTCACAGTTGCAAAAGGCTG |
| | | | AAAAATGCTCTGTGACCTGGCACCCCCTTGGGGAACCACAGT |
| | | | GCATTAAAGGCTCT |
| 433 | MIR4435- | 2570906 | TTGTGATTTTCGTTCCTGAATTCATAGAG |
| | 1HG | | |
| 434 | MIR4435- | 2570907 | GGTGCCCTGCAATGTTAAGCAAAAAAAAAAAAAAAAAAAAAAAG |
| | 1HG | | ACTTTGGAAATAGAGTTATGGAGCCAGGATGGGTCTTGAGTTA |
| | | | GCCTCACTCTTTATTTCTTTATTCAAGGAATGGTTGTTCAGGGC |
| | | | CAGCGGCTCAGCCCTGGGAGCACTGACTGCTTCAAGACACAG |
| | | | ACTCCTCTGGGATGCCAGGCAGAGTCTGCTCCTGAAGGCAGA |
| | | | CTCCACTCTTCATGGGG |
| 435 | MIR4435- | 2570908 | CCTCACCTTTGCAGGAGACTCTCAATTTCTCAGTCCACATCAG |
| | 1HG | | CTCTCAGACCACCAAAGCAAGGGTTATTTTTCTAAAAGACATTT |
| | | | GTTCCCATTGCTCCTCTGACTAAAGTTCCTACTATGGGACATTT |
| | | | GCCCTTGGCACTCAAGGACCTTGCAATCAGGCTGAGAACCTC |
| | | | AGGTTCTCAAACTCAAGACCATGGGGAATGTAATAGGTGAATC |
| | | | AGGCAGGTGAAGTCCAGGACTC |
| 436 | MIR4435- | 2570909 | CAGGATGACTCAGAACCCGCGTATGAATGCTGTCTATTCATGG |
| | 1HG | | GTCCAGGCTTTTGTTAAAGTCTGGGCCTGCA |
| 437 | MIR4435- | 2570910 | TGTTGAGTGCTAGCTGTTGTTGAGTGCTTGTCCTGCCTGGGCC |
| | 1HG | | CTGTTTTTAGCCTTTGATGTACATTTCTCCATTTAACTTCCACAA |
| | | | TAGCCCTATTAGGCAGCTAGTATTATT |
| 438 | MIR4435- | 2570911 | CAGGGCTTCCTTCAACTCAGGGTTC |
| | 1HG | | |
| 439 | MIR4435- | 2570912 | CCCGTGGAGAGAGCCCCGCTGGTGAGGAAGCACGGGGACCC |
| | 1HG | | TGCTGCAGGGCTGGTGGAGGGCTCCTTCTGTAGACTTCTGAG |
| | | | CTTGGAGCACAGATGGG |
| 440 | MIR4435- | 2570913 | TCAGGTCATCCGCTCCATGGAGGTCCCCGTTCCTACCTTGGC |
| | 1HG | | CTTGCCTTTCCCCCTGCATGTAACCTTGGTGAACTTTTCACAA |
| | | | GAGTCTGCGCAGTCTTCTTGTAAGCAGATTAATGCCGAGGAAA |
| | | | AGCCTTGGTG |
| 441 | MIR4435- | 2570914 | TTCTCTCCCGACAGGAGCGGCCAGGACAGGGAGCAGAAGGT |
| | 1HG | | GACTGCTGTGCTGCCTGGAGCTCTTCTGTCCGGAGGTTTAGT |
| 442 | MIR4435- | 2570915 | ACTCCGTACAGAGAGCGTTCCAGCC |
| | 1HG | | |
| 443 | MIR4435- | 2570916 | AGAATCAGTTGTCTCCCAGGCGGGG |
| | 1HG | | |
| 444 | MIR4435- | 2570917 | ACAAGGGCGGTGCATCAAGACCACA |
| | 1HG | | |
| 445 | MIR4435- | 2570918 | CGGCCCCCAGATATCTGAGGAAGGCTGAGC |
| | 1HG | | |
| 446 | MIR4435- | 2570919 | AGACTGACCCTACAATAAATGCTTAAGAGAGTCCTACATCTGG |
| | 1HG | | AAGCAAAAGGGCTATATTCACCATCATGAAAACCCAAAAGTAT |
| | | | AAAACTCATTGGTAAAGCAGACACACAAATAAGAAAGAGAATG |
| | | | GAACCACATGTTATCATTACAGAAAACCACCAAACTGCAAAGA |
| | | | TAAACAAAGGAAAGAAAGAAAGAAAGGAAGGAAGAAAGGAAG |
| | | | GAAGAAAAAGGATTATTTAAAATTATCAGAAAACAATTAAAATG |
| | | | ACAGGAATAAGACCTCACCTATCAATAACAACTTTTTTAAATGG |
| | | | CTTAAATTTCCCAGTTAAAAGATATAGACTGGCTGAATGGATTT |
| | | | TAAAAGTGACCTAACTCTATGCTA |
| 447 | MIR4435- | 2570920 | GGTATTACCTGATCCCAACTTGGCACCAAAAGACAGCCAACAT |
| | 1HG | | AGACTCATTCCTCCTGCTTCCTGGTGAGCCTGGTATTCTCCTC |
| | | | CACTTCCACTGACAGACATGTAGGGTGACTGGGTGGTATCAA |
| | | | CAATAGGAACCACATCATAACAGGCAGCCTAGTTTGGGAAGC |
| | | | ACTCTTGGTCTCCGTAGGCCTGAGACTCCTTTTGCCCATCTAG |
| | | | AGG |
| 448 | MIR4435- | 2570921 | ACTTAAAATAGGAGTGAGGTGAGAGGGGCAGCTGGGCTCATG |
| | 1HG | | GACGTCAAGTGGACAGTTTCTCAGCTGGTATTTCCTATATTTC |
| | | | CTGTTTTGGACAGCAGGTTCCTGCCCTTCTAAGCTGGGGGTA |
| | | | GGGGTGAGGGAGTGTATGTTAAAAAGCTCTGTGGACTTGCT |
| 449 | MIR4435- | 2570922 | GAGCCCTTGTTCAGTGATCCTATGACTTGTCAGCTCAGTGAAT |
| | 1HG | | TGCTCTGACTCTTACTGCTTTCATTTATGAAATGGAGACAATAA |
| | | | CCCCTCTCTCATAGGAAGGGTAAGACCAGAAGAGCCTACACT |
| | | | ATGGTTGGAATAATATTTGTATACAGTGATCAAGAGAATGTTCT |
| | | | CTGAAACCAGACTCTCTTTAAATCTTACCTCTATCACTTATTAG |
| | | | TTATATGGCTAGCTGTTAAATGAGGTCAAAAGAGTGTGTTCTTC |
| | | | ATAAAACTATACAGAAGATTAAATTAATTAAAACATGTACAGTC |
| | | | CTTTTAAAAAAGATCAAGTGAAACAGCATACATGAAAGTGCTTT |
| | | | CAGCACGCTGAGAATAACAATAGCAATGGCTAGAGATTATGGA |
| | | | GCACTCCCCACTGCCAGCACCAGGGGAACTTTGTACCTACAA |
| | | | CTTTTTACTTAGTCCACATAACCATGAATTCGTCTCATTTATGTA |
| | | | GACCGGGAAACA |
| 450 | MIR4435- | 2570923 | CAACCCAGGGTCCTTGCAGAGAGATTGATCTGCCAGCAGTGG |
| | 1HG | | CATCAGCAGCAATAGTAGCAGCAGCAAAGCCCTGGACAGTCC |
| | | | TGGCCCCCAGTCCACAACTTAGACACAGCACATGGCCTAATTC |
| | | | ACCCACAGAAGCAGCCACTGTGAAGCCCTGTGTCTCCCCAGA |
| | | | CTCCATCCAGTGGCATAAGGAGACCCAGGCCCTGCAGCTTCC |
| | | | TCCCCATCATGGAAGGCTGTCCATCTA |
| 451 | MIR4435- | 2570924 | TTCTTTTTGTCTCCCATATACGCTG |
| | 1HG | | |
| 452 | MIR4435- | 2570925 | GCTCTGCCGACTTCCAGTTCTGGAACAAGATGGTTAAACTCAT |
| | 1HG | | TTTTCCCTGCTCTGCTCCTCTAAATACAACTAAGTACCTTGGAA |
| | | | ACTATTCAGCAGACAATGATAAAGGGCTCTGAAAGCTAGAAGA |
| | | | AAAGGTGTACTTGCAAGAAACCTCAGGACT |
| 453 | MIR4435- | 2570926 | GACATAGAATCAACCAAAATGGCCATCAGTGATAGACTGGATA |
| | 1HG | | AAGAAAATGTGGTACATATACACCATGGAATACTATGCAGCCG |
| | | | TAGAAAGAAACGAGATCATGTCCGTTGCAGGGACATGGATGG |
| | | | AGCTGGAAGCCATTATCCTCAGAAAACTAACCCAGGAACAGAA |
| | | | AAGCAAACACCACATGTTCTCACTCATAAGTGGGAGCTGAAGA |
| | | | CTGAGAACACATGGAACCAGGGAGAGGAACAACACACACTGA |
| | | | GGCCTGCCACTGCAGGTGGGGGTTCAGGGGAGGGAGAGCAT |
| | | | CAGGAAAATAGCTAATGCATGTCAGGCTTAATAAGTAGGTGAT |
| | | | TGGCTGATAGGTGCAGCAAACTGCCATGGCACACGTTTACCT |
| | | | ATGTAACAAACCTACAAATACTACACATGTA |
| 454 | MIR4435- | 2570927 | TGTCTTGCTGGCCTGAAATCGAGTACGCAGCCCGGGGTGATC |
| | 1HG | | AGGGTCTCCCGGCCCGGATGTGTGAGACTTGCTTCCCCTGGG |
| | | | CAATAGGCGATACGATGCTTTAGGAGGAAGGTGTCTCTCCCTC |
| | | | CTAAGCCCCGGAGGGGAGAACTTCCAAAGACAGAAAACCACA |
| | | | GGCTTCCTGGCACAGAGCTTTCCCTTTATCAGCTAAAGCAGAA |
| | | | TCTTTTCTGGCCTTAACCTGGCCCCTTCCTCTAACTGCAGGCA |
| | | | GAGAGGCAGACAGAAAAGCACTTGCTGAAACACAAAGTTTTGT |
| | | | TCTGTCCTCAACGAACTGTCTAGAGCTGATTGCTGATAGTCGT |
| | | | GGTGCATTATGCCTTCCTGGTTTTCATTTAATTGGGCACCACG |
| | | | CTGCCTTTCAAGACGCCTTAAAGGAACCAACAACCAAATCCAA |
| | | | GAGAGCTGGACAGACCATTGAACACACAGTAGGCTGTGTCTC |
| | | | GTGGCTTTCGTTGTCTGGTGCCTCAAAGAAAACACCAGAAAGA |
| | | | TTGTTTCTAAGCTAGAGCCACCCCAGATTGCTTAAAGTGCAAA |
| | | | GCTCACTGCTGTTGGGGGTACCCTTGTGAGACACTGGAAAGC |
| | | | TGGTTTTACCGTGGCCCTATGAA |
| 455 | MIR4435- | 2570928 | CCGAGGAGGCGGAGCATGGAACTCGACAGTTAAAACATTTAA |
| | 1HG | | GAGA |
| 456 | MIR4435- | 2570929 | AGGCAGCCTTTTCTGTCACAACACAACGCTGAGCCGGCAGCC |
| | 1HG | | TGGCTCTGTCAGGATCTGGGGCTCCCGCGCCCGAGAAGCCC |
| | | | AGCCTCGCCGGCGGCCAAGTTCACCGCGAGGCC |
| 457 | MIR4435- | 2570930 | GACTCTGAAACTACCCGGCTCTGCAGAAGCACGCTGGGCCCA |
| | 1HG | | GGGGCTTCTAGACTGACAGC |
| 458 | MIR4435- | 2570931 | AAAGGCTGCAGTCACCAGCATCTTTTCCAACCTTAATGAACTG |
| | 1HG | | TATCCTCAAAAGAACACTATCAGACTG |
| 459 | MIR4435- | 2570932 | GAAAATTCCTATCCCACCAGCAAATCAGCCCG |
| | 1HG | | |
| 460 | MIR4435- | 2570933 | CTCCCAGATAAAGAGATCAACACGGGACAG |
| | 1HG | | |
| 461 | MIR4435- | 2570934 | GGGTTCCTGTCGGAATCTTGGAGCTCATCCCCCAAACTTGAGA |
| | 1HG | | TT |
| 462 | MIR4435- | 2570935 | CAAAGGCTTCTCTTGCTGGCTGAGAATTGTTGGGGAGCTCCCT |
| | 1HG | | GCCCACGGAGGGC |
| 463 | MIR4435- | 2570936 | AAACTTTAAGGAAGACAACTGTGCATTCTC |
| | 1HG | | |
| 464 | MIR4435- | 2570937 | TGGAACATACGTTCTTGTGAACATAGAGAGTGGCATTTTCTTAT |
| | 1HG | | GTCGATGTAATGTGAACAACTCCTGGTCACC |
| 465 | MIR4435- | 2570938 | TTGGTACATGCCAGCACGGTCTGTG |
| | 1HG | | |
| 466 | MIR4435- | 2570939 | GATTCACTGTGCGAGGACCCACCTGACACC |
| | 1HG | | |
| 467 | MIR4435- | 2570940 | GTAAGGTGACCAATGGCTGGCTGAAG |
| | 1HG | | |
| 468 | MIR4435- | 2570941 | TCCGAGCTGTCACGTGGTTTATACA |
| | 1HG | | |
| 469 | MIR4435- | 2570942 | TCAGGTTTGCTGGGAGGAATCCAGAA |
| | 1HG | | |
| 470 | MIR4435- | 2570943 | CCACTCTAGGCAGGACTTTCATATCCTTTATCTAACTGTCACAT |
| | 1HG | | GATGGGGTGACATGTTGATCCCCCCACAGCCTGGATGATAGA |
| | | | AATATTTGTGGTTTGATATGCGTCAGCGCTTATGACTTTGGCAT |
| | | | A |
| 471 | MIR4435- | 2570944 | GGTCATATTTCACGTCTGCCCTGTA |
| | 1HG | | |
| 472 | MIR4435- | 2570945 | TGCTTTACAAACACTGACTCCTCAACACACGGTCATCTCTAAA |
| | 1HG | | AGAAAGGGTGTTTGGCAGTTCCTCGACAGTTCTGGAAAGGCT |
| | | | GCCTTACTAGAAGCAGAGTCA |
| 473 | Ml R4435- | 2570946 | TATTTTGGTCATGGGCTGGTCTGGTCGGTTTCCCATTTGTCTG |
| | 1HG | | GCCAGTCTCTGTGTGTCTTAATCCCTTGTCCTTCATTAA |
| 474 | MIR4435- | 2570947 | CACCTCTACCTGTTGCCCGCCGATCACAGCCGGAATGCAGCT |
| | 1HG | | GAAAGATTCCCTGGGGCCTGGTT |
| 475 | MIR4435- | 2570948 | TGACAGACACTGAAAATCACGACTCATCCCCCTC |
| | 1HG | | |
| 476 | MIR4435- | 2570949 | TGAAACAGGAAGCTCTATGACACACTTGATCGAAT |
| | 1HG | | |
| 477 | MIR4435- | 2570950 | AGCGGCAGAGCAGTTATTAACAGAATCACAGTCTTTCTGGAGC |
| | 1HG | | TGCTGTCAGTCCTGTGCTGTCCTCAGGGCCTTTGCTTGGTCAG |
| | | | GGGCCCCACTTCTTATCCACCCTTCCCTCTACCTCACCGAGGC |
| | | | TGCTAGGCCCAGGTGTATTGTGATTATTTGATGCACCTGGGAG |
| | | | GCCATGTCTCCCGGGGAGTCTCAGGACCTCATTGGGCTGGAA |
| | | | TTCCACGGGGATCTCTCATTGGGTCTCTTTGGGCCTTTGGAGA |
| | | | GGGGAGTGCAGGGCACCACCTGGGCGAACACCTGTGCCATC |
| | | | CTGTAAGTCCTTGTGTGACTCTTCATCCAAGTCAACAGGGGC |
| 478 | MIR4435- | 2570951 | CGTGGACCCGGCTATGTCTGACTTTGTGCTG |
| | 1HG | | |
| 479 | MIR4435- | 2570952 | GGGAACAAAATGTCTGCTCAAACCATGACAAAATTGGCCACAA |
| | 1HG | | TTTGCCGATTGGGCTGATAACAAAAG |
| 480 | MIR4435- | 2570953 | GTGTGTACTAATCACTCAGACAGTG |
| | 1HG | | |
| 481 | MIR4435- | 2570954 | GAAAAGATTTTTATTCGTGTCTACATCAGTGTGAAAGGCTTCAT |
| | 1HG | | CCTG |
| 482 | MIR4435- | 2570955 | CTGGGGACACTATGGCCCCATCCTAGCCTGGTG |
| | 1HG | | |
| 483 | MIR4435- | 2570956 | TGGGAGGCCAAGGTGGGCGGATCATGAGCTCAGGGGTTCAA |
| | 1HG | | GACCAGCCTGGCCAACGTAGTGAAACCCCGTCTCTACTAAAA |
| | | | ACAAAAAAATTAGCTGGGCATGGTGGCGCACACCTGTAGTCC |
| | | | CAGCTACTCGGGAGGCTGAGGCAGGAGAATTGCTTGAACCTG |
| | | | GGAGGCAGAGGTTGCAGTGAGCTGAGATCGCTCCACTGCACT |
| | | | CCGGTTTGGGC |
| 484 | MIR4435- | 2570957 | TTGCTGATATACTTACAAACTGGTAAACAATGCTCTTTAATCAA |
| | 1HG | | CAATTCATAATCTGGGTCAGCGATTTTTATCTCCATATTTGCTC |
| | | | ATACTGTATGACATCAATATTTTATATTGGCTTGCCCATAACTT |
| | | | A |
| 485 | MIR4435- | 2570958 | CTGTGCCAGTCAAGCCTGGCCTGTGGCTGTGACACCTGCATT |
| | 1HG | | ACCCCAGATGGTTGCCTGACCTAGGCCTGTCCTTCTATCTGCT |
| | | | TTGTTTTTATGTTGATTACTAGGTGAAGCACAGTGTTAAAAACG |
| | | | GGAAGAAAAGGCTAGGAATGCAGTTATGGGAGTGTGAGGCTG |
| | | | GGTTGGAATAGGTGGGAGAAAGTCCAGGGCTGAGTGTGTGGA |
| | | | CCCTGCTCTAGGGATCTGACCGGCTCAAGCTCCCAGGCCATT |
| | | | AAACAAAGTTG |
| 486 | MIR4435- | 2570959 | CTGTTGCCATTTGAACAAGTTGTTAAGAAAATCTGCCATGTTTT |
| | 1HG | | GCTCTTTTTTAAAAGGAATGACTTTAATAACCATAGCAACACTT |
| | | | ACTCAGTTTTGTGATCCACTCCAAGATTATGGGAGCAAGAACA |
| | | | GATACTCCTGAAAGCAACCCTCACCTCCTCCCCCGCCCCCTG |
| | | | CCCTCAGCAAGTCCTGGCCTGTGTGAACTGAAGGGTTTGGAA |
| | | | GCTCTGGTTTCTAGGAGTGCCCAGAAGCTAGAAAGACTAGGG |
| | | | TGTACTAGTTATTGAGGGGCAGTTGTC |
| 487 | MIR4435- | 2570960 | AAAGGCATTTCTGATTTAATTAAGAGTTG |
| | 1HG | | |
| 488 | MIR4435- | 2570961 | ATGAAGGAGGAGTCGTCTACACTTGTAAAAA |
| | 1HG | | |
| 489 | MIR4435- | 2570962 | TCCTTGAGTTAAAGAAATTTGTGTC |
| | 1HG | | |
| 490 | MIR4435- | 2570963 | TAATCCAGTGCTCAACATATTTTTGTTGAATAAAAGCACAAAGA |
| | 1HG | | GATTCATGAGAAGAGGGAAATGTTGCATACTTAGGGTAGGAG |
| | | | CAAACCACAGAGGTCTTTCTCAGCCTGGGCAAAGAATGTCAAC |
| | | | TCTGTGTTGGAGCCAGTAGGGAGCTCTGTGGGTCCTCGAGCA |
| | | | GGAAAATCCCATGGCTTAAGCAGTGTTTCAGGAAGACTGGGA |
| | | | TGTTAGGCTCCAGAGCTCTGAGCAAGTCAGATGGGACTGGGA |
| | | | GTCATAAGAAGGCTTGACTGTGGCTAGTGATAACCAATGAGCA |
| | | | CTGGAAACATGGAGGGGAATCTTTCCTCCCTTTTATATCAGGG |
| | | | TTCTCTCCTAGAGGAGCAGGTGAGGACCTCTGATGGACCAGG |
| | | | AAATTGGAATTCTGCCTGGGAGGCAAGCCCATGGAGGCCCTG |
| | | | ATCTGCTTGGACAGAGAGTAGCTCCCTTCACCTGTAAAATGAG |
| | | | AGTGAACGAGCTGGTGTCTAAGGAATTCAGAATCCCCCCCCT |
| | | | GGAGTTCCACAGGGTATGTGGGATTTTAGGGGGACCAGGGTG |
| | | | TCCCCAGTGCAAGAAGGAGGCTCCCACCAAGGGGCTGCAGC |
| | | | ACTGCAGATAACCCCCAGGGGTATGAAAAGAGGCTGAACTGG |
| | | | GGGCCTCCACAGTCAGAATCCATCCATTGACCCAGGATG |
| 491 | MIR4435- | 2570964 | CCCTGGCATCATATTGGGACTTGTTAAGGGCTGAATTGTGTCC |
| | 1HG | | CATCCCAAATTTGTATGGTGCCACCCCAACTCCAGTACCTTGG |
| | | | AATGTGACCGTATTTGGAGAAAGGGTCTCTGAAGAGGTAATTA |
| | | | AGGTAAAATGAGGTCATATGGGTGGCCTCTAATTCAATATGAC |
| 492 | MIR4435- | 2570965 | TTTCCATTTCCTAGTAGGGCCAGTC |
| | 1HG | | |
| 493 | MIR4435- | 2570966 | TATGTGCATTAGTTTGCTTGGACTGCTATAACGAAATACTACTT |
| | 1HG | | GGTG |
| 494 | MIR4435- | 2570967 | GAGCTTTTAGAGAATATGGGCCAGAAACAGGAAGGAGTCAGG |
| | 1HG | | ACCTGATAACGGGAACCAGCGGACAGTGAACGCAGTG |
| 495 | MIR4435- | 2570968 | GTGAATACAATATTCTCCTTTTGTTTTCACTTTTCCTAAAAGTTA |
| | 1HG | | AATCAAGGTTCAAAAGAAAATCGAGG |
| 496 | MIR4435- | 2570969 | AGATGCTAATCCAGCGTGCGTCCTGGCAGAGGTTGAAGGGGG |
| | 1HG | | CTCCTCAAGTCCCAGGTCCAGCTTGGTGTGGTTCAGCTACTC |
| | | | GAGAGACATCTGCTGCTAATGGATGAGCAGTCAACCTGGACG |
| | | | CAGG |
| 497 | MIR4435- | 2570970 | TGTGAAGACTGGACTTAAACAGCTACACCACCAGAAGCCGAG |
| | 1HG | | AGAG |
| 498 | MIR4435- | 2570971 | AAATTGACATTCCAGACAAGCGGTGCCTGAGCCCGTG |
| | 1HG | | |
| 499 | MIR4435- | 2570972 | CTTAGTCGTGTGTACATCATTGGGAATGGAGGGAAATAAATGA |
| | 1HG | | CTGGATGGTCGCTGCTTTTTAA |
| 500 | MIR4435- | 2570974 | AATCCCATGGTCTTCAATTTGGTCATTTAAAAATAATCTACAAG |
| | 1HG | | GTATACTGTTTTT |
| 501 | MIR4435- | 2570975 | CACCACTCTATTTAACAGTGCTGGAAATATTAGCCAGCAAAAC |
| | 1HG | | AGATAAAGAAAAATAAATAAATGGCATAGACTGGAAAGATTCAT |
| | | | AGTTGGCACAATTATGTATATATAAAATCCTCAGGAATGTACAC |
| | | | TTTACATACTAGAATTTAAAAGTAAGTTTAGCAACTGTGTTAGT |
| | | | TCGTTTTCATGCTGCTGATAAAGACATACCTGAGACTGGACAA |
| | | | TTTACAAAAGAAAGGTTTATTGGACCTATAGTTCCACATGTCTG |
| | | | GGGAGGCCTCACAATCATGGCGGCAGGCAAGGAGGGGCAAG |
| | | | TCACATCTTATGTGGATGGCAACAGGCAAAGAGAGAGCTTGT |
| | | | GCAGGGAAACTCCTGTTTTTAAAACCACCAGATCTCATGACAC |
| | | | CCATTCACTGTCAGGAGAACAGCATGGGAAAGACCCACCCCC |
| | | | ATGATTCAATTGTCTCCCACAAGGCCCCTCCCATACCACATGG |
| | | | GAATTATGGGAGCTACAAGATGAGATTTGGGTGGGGACACAG |
| | | | AGCCAAACCACATCAGCAACATGTCAGAACACAGAAAAAATGT |
| | | | AAAATATCACTGTATTTCTATGTACTAGTAGTGAACTGTCAGAT |
| | | | GTTAAAATTCAATTGCTTAGAATGGCATCAAAAATATGAAATAC |
| | | | TGGCCAGGCGTTATGGCTCTTGCCTGTACTCCCATTGCTTTGG |
| | | | AAGGCTGAGGCGGGTGGATACCTTTGAGGCCAGGAGTTCAAG |
| | | | ACCATCCTGAGCAACAGGGCAAAACCTTGTCTCTACTAAAAAT |
| | | | ACAAAAAATTAGCTGGGCATGGTGGCCTGTACCTATAATCCCA |
| | | | GCTACTTGGGAGGCTGAGACACAACAATCACTTGAACCTGGG |
| | | | ATGCAGAGGTTGCAGGGAGCTGAGATTGAACCACTGTACTCC |
| | | | AGCCTGGGGAACAAACTGAGACTCTGTCTCAAAAAAAAAGAAA |
| | | | GAAATACTTATGGGTAAATCTGACAAAATAAGTGTAAGACCTG |
| | | | TACACTAAAAACTACAAAACATTGCTGAAATAAATTAAAGAAGA |
| | | | CCTAAATAATCGGAGAGATATACTTTGTTTAAAGGTCAGAAGT |
| | | | CTCAGTATTGCTAAAATGAGAACTCTTCCCAATGCAGTGCTAA |
| | | | TCAAATTTCTAGCAGGCTTTTTGTAGAAATTGAAAAGCAGATTT |
| | | | GAAATTCATATGGAAGTGCGAACAAAACC |
| 502 | MIR4435- | 2570977 | CCACCATGTGATACCACTACATGTATTTTAGAATTGCTAAAATT |
| | 1HG | | AAGAAGACTGACCATATGGGGTGAGGATATGGAGGAAATGAA |
| | | | ATTCTCATACAATGCTATTGGTAATGTAAAATCAAACTACCACT |
| | | | TTGGA |
| 503 | MIR4435- | 2570979 | GCTTGAACCAGGAAACTGGATATCATCTTAA |
| | 1HG | | |
| 504 | MIR4435- | 2570980 | ATGTTTGGGAACCCAACAATTAATGCAG |
| | 1HG | | |
| 505 | MIR4435- | 2570982 | CCCGAATGTATCTCCCAGATGTCCAGAATACGCCATCTGCAAA |
| | 1HG | | ACTGAACTCATCCTCTTTCCCCAGAATGTATCTCCCGGATGTC |
| | | | GAGAATACGCCATCTGCAAAACTGAACTCGTCCTCTTTCCCCC |
| | | | GAATGTATCTCCCAGATGTCCAGAATACGCCATCTGCAAAACT |
| | | | GAACTCGTCCTCTTTCCCCCGAATGTATCATCTCCCAGATGTC |
| | | | CAGAATACGCCATCTGCAAAACTGAACTCATCCTCTTTCCCCA |
| | | | GAATGTATCTCGCGGATGTCCAGAATACGCCATCTGCAAAACT |
| | | | GAACTCGTCCTCTTTCCCCCGAATGTATCTCCCGGATGTCCAG |
| | | | AATACGCCATCTGCAAAACTGAACTCGTCCTCTTTCCCCAGAA |
| | | | TGTATCTCCCGGATGTCCAGAATACGCCATCTGCAAAACTGAA |
| | | | CTCGTCCTCTTTCCCCCGAATGTATCTCCCGGATGTCCAGAAT |
| | | | ACACCATCTGCAAAACTGAACTCGTCCTCTTTCCCCCGAATGT |
| | | | ATCTCCCGGATGTCCAGAATACGCCATCTGCAAAACTGAACTC |
| | | | GTCCTCTTTCCCCCGAATGTATCTCCCGGATGTCCAGAATACG |
| | | | CCATCTGCAAAACTGAACTCGTCCTCTTTCCCCCGAATGTATC |
| | | | TCCCGGATGTCCAGAATACGCCATCTGCAAAACTGAACTCGTC |
| | | | CTGTTTCCCCCGAATGTATCTCCCGGATGTCCAGAATACGCCA |
| | | | TCTGCAAAACTGAACTCGTCCTCTTTCCCCAGAATGTATCTCC |
| | | | CGGATGTCCAGAATACTCCATCTGCAAAACTGAACTCATCCTC |
| | | | TTTCCCCCGAATGTATCTCCCGGATGTCCAGAATACGCCATCT |
| | | | GCAAAACTGAACTCGTCCTCTTTCCCCCGAATGTATCTCCCGG |
| | | | ATGTACAGAATACGCCATCTGCAAAACTGAACTCGTCCTCTTT |
| | | | CCCCCGAATGTATCTCCCGGATGTCCAGAATACGCCATCTGCA |
| | | | AAACTGAACTCGTCCTCTTTCCCCAGAATGTATCTCCCGGATG |
| | | | TCCAGAATACGCCATCTGCAAAACTGAACTCGTCCTCTTTCCC |
| | | | CCGAATGTATCTCCCGGATGTCCAGAATACGCCATCTGCAAAA |
| | | | CTGAACTCGTCCTCTTTCCCCCGAATGTATCTCCCGGATGTCC |
| | | | AGAATACGCCATCTGCAAAACTGAACTCGTCCTGTTTCCCCCG |
| | | | AATGTATCTCCCGGATGTCCAGAATACGCCATCTGCAAAACTG |
| | | | AACTCGTCCTCTTTCCCCAGAATGTATCTCCCGGATGTCCAGA |
| | | | ATACTCCATCTGCAAAACTGAACTCGTCCTCTTTCCCCCGAAT |
| | | | GTATCTCCCGGATGTCCAGAATACTCCATCTGCAAAACTGAAC |
| | | | TCGTCCTCTTTCCCCAGAATGTATCTCCCGGATGTCCAGAATA |
| | | | CGCCATCTGCAAAACTGAACTCGTCCTCTTTCTCCCGAATGTA |
| | | | TCTCCCGGATGTCCAGAATACGCCATCTGCAAAACTGAACTCG |
| | | | TCCTCTTTCCCCCGAATGTATCTCCCGGATGTCCAGAATACGC |
| | | | CATCTGCAAAACTGAACTCGTCCTCTTTCCCCCGAATGTATCT |
| | | | CCCGGATGTCCAGAATACGCCATCGGCAAAACTGAACTCGTC |
| | | | CTCTTTCCCCAGAATGTATCTCCCGGATGTCCAGAATATGCCA |
| | | | TCTGCAAAACTGAACTCGTCCTCTTTCCCCCGAATGTATCTCC |
| | | | CGGATGTCCAGAATACGCCATCGGCAAAACTGAACTCG |
| 506 | MIR4435- | 2570984 | ATGTCCAGAATACGCCATCTGCAAAACTGAACTCGTCCTCTTT |
| | 1HG | | CC |
| 507 | MIR4435- | 2570986 | AAAGAGATTCTCACTTAGAGACATCATAAGGAAACTACTGAAA |
| | 1HG | | ACTAGGAACAAAGGAATTATCTTCAAAGCAGCAATGAAAAATG |
| | | | ACATTATTTATAAAATTACAATTATTTAAAGGGTTGTAGATTTCT |
| | | | CATCAGAAACCATAGAGGCCAGGCCGGGCGCTGTGGCTCAC |
| | | | GCTGTAATCCCAGCACTTTGGGAGGCCGAGGTGGGCAGATCA |
| | | | CTTGAGGTCAGGAGTTCAGGACCAGCCTGGGCGAAACCTGG |
| | | | GCAAAACCCTGTCTCAACTAAAAAATAAGAAACTTAGCCAGAC |
| | | | GCAGTGGTGTGTGTCTGTAGTCCCCGCTACTCAGGAGGCTGA |
| | | | GGCAGGAGAATCGCTTGAACCTGGGAGGCAGAGGTTGCAGT |
| | | | GAGCCGAGATCACACCACTGCACTCCAGCCCGGGCGACAGA |
| | | | GCATAGAAGCCAGAATGCAATTGAACAACATTTC |
| 508 | MIR4435- | 2570988 | TCAGTCACGTCTGCGCCAGAGCTTTGATGACCCACCTGTCAG |
| | 1HG | | CCACACTAAGGGCCCTGCCATGAATAAGGCCTCCGTCACTGA |
| | | | GGATCCTGTACCCCTCTGCCATAAACTCAGTGACCTGACTG |
| 509 | MIR4435- | 2570989 | CCCACATTCAAAAGGCTTGCCCGAGAGGCCT |
| | 1HG | | |
| 510 | MIR4435- | 2570991 | TCAAGGTGGCCTTGCGCTTCACCGAGGAGGTGTCATTACCAA |
| | 1HG | | ACGTGCTGGACATTGGCTACCTACGGAAGAAAGATTAA |
| 511 | MIR4435- | 2570992 | CCAGACACCACTGGCCTACATCAAACTCCAGGCCACAGATGG |
| | 1HG | | AAATAGGACTGAGATCCCTGGACCTGGG |
| 512 | MIR4435- | 2570993 | ATGAAGCTAGGCCCCCCTGTCCTGACAGCTTTCCACCCCTTCC |
| | 1HG | | CTGCCCCTCTCACCCTGCTTTCCAGGGGCAATGCACCTCCCC |
| | | | ACTTCT |
| 513 | MIR4435- | 2570995 | TGTATTTGGCATCTACCATATCTTTGCATC |
| | 1HG | | |
| 514 | MIR4435- | 2570997 | CACACATAACTCTGGGCGTAAAGTGAGTAAAAATATGAGACTT |
| | 1HG | | AGAAGAATATTTCATCATGGTATGCTGATTGGGGATTTCACTTA |
| | | | CTGA |
| 515 | MIR4435- | 2570998 | TCACTACGATTATCTGAATCTCATA |
| | 1HG | | |
| 516 | MIR4435- | 2571000 | TCACCCTTGACATCCGCAGAATCCACCCTCCT |
| | 1HG | | |
| 517 | MIR4435- | 2571001 | AGTCCTGGGGAACTCTCATCTGGAAAAAGGCGCTCATGACAG |
| | 1HG | | GTGGTGCCAACCTTCCACGGATGCTTTTCAGCA |
| 518 | MIR4435- | 2571019 | TTCAGCGCCGAATTGATGAGGACAC |
| | 1HG | | |
| 519 | MIR4435- | 2571021 | ATGGAGAAACAGGCGGCCCAGCCAGGCCCTTTCACTGCCCGT |
| | 1HG | | GATGGA |
| 520 | MIR4435- | 2571023 | TCCACCAGACTGATGACACTTATTCCACTTGGTTCCCAGAACT |
| | 1HG | | AAGAG |
| 521 | MIR4435- | 2571025 | GGGCATTTGGACTCTAACCGGGACAACCTAGTGGCCGGGCAG |
| | 1HG | | GGGATGCAGGCACCACAGGTCACAGTAGTTTGCTACGAGTGT |
| | | | CAGCTTTT |
| 522 | MIR4435- | 2571027 | CCTGTGGGAATCCATAAAGAATTGATTCTCATCCCCCAGAAGT |
| | 1HG | | GAGATCCCGCTTGTGTCATCA |
| 523 | MIR4435- | 2571029 | CTGGTGCACCTGGTCTACCTCATGTCCAGTGTTT |
| | 1HG | | |
| 524 | MIR4435- | 2571031 | TCCTGCAGTTCCAATGTGAGCAGCAGTTGTTTCCAAGGCTAAC |
| | 1HG | | AATTTCACGCCAACTAGAAGCCTCCACAAGTCAGGTGCCAGG |
| | | | CATTTCTAAGCCAGTAGAGCAGCTCCGCTTGTTTCTC |
| 525 | MIR4435- | 2571033 | CTTGGCTGGTGGATCTCGGGTTAAAATCGACTTAGGATGCCC |
| | 1HG | | CCCTTAT |
| 526 | MIR4435- | 2571035 | GCTTCTGCAGTTTGCCTTGGAGTCTGGGCTGT |
| | 1HG | | |
| 527 | PGM5P4- | 2571794 | TGAATTTATATTACCGAGTGGAGGGTCACATG |
| | AS1 | | |
| 528 | PGM5P4- | 2571795 | AGTAAATCCATTTGCTGATTGCAATA |
| | AS1 | | |
| 529 | PGM5P4- | 2571796 | CTCTTGTGTAAAAATCTAACTCATCTCGCTGAATTTCCTGATTT |
| | AS1 | | AAAAGTCTAATTCATTTCACCAAA |
| 530 | PGM5P4- | 2571797 | CCAGACGTACAGAGGCTGGGAGCCATTGTGGTGTGCTATATT |
| | AS1 | | GATGACGGCAGCAGTGGG |
| 531 | PGM5P4- | 2571798 | TTGTGTATCTGCGTTCCTTTCAACAAGTGTGACTTCCTCAATGG |
| | AS1 | | CATCATTCGTGAGCGTAACACAGAGCTCAGC |
| 532 | PGM5P4- | 2571799 | GAGCTGAAATCGACCAGGGGGTTCTTATCCAACAG |
| | AS1 | | |
| 533 | PGM5P4- | 2571800 | GCCTACCTAAAATATTGAATGCTGTTAATAAATCTCCTGAGGC |
| | AS1 | | CAGCATAAGAAGGTGATGGGCAAAACTAAT |
| 534 | PGM5P4- | 2571801 | CTTAGAGGGCCCCACAGTTGTTTGCTG |
| | AS1 | | |
| 535 | PGM5P4- | 2571802 | TGGTTACAATGGTACTTTCAGCCTGTCCGAATTATGTATTGCC |
| | AS1 | | CCTCCCCTTTTTATTAATAACATTGAAGTGTGATGGGACAACCA |
| | | | CTGAAGCCGTCAGTTGAAACCTGCTGGGACTTTTTAGCCATTC |
| | | | TCTTCAACATAAAGAATGGGTGTTTTTGGAGGGGGTGAGAGG |
| | | | AATGGGGAAATGTTGTCAAAGAGTACAATGTTTTAGTTGAGAC |
| | | | AGGAAGAATATATTTTGTTGAGATCTACAGCACAGCATG |
| 536 | PGM5P4- | 2571803 | TGTGCTAGGTTTCTTTGCATGTACC |
| | AS1 | | |
| 537 | PGM5P4- | 2571804 | AGCCTCCTCCAAAACAGCACACTTTCCG |
| | AS1 | | |
| 538 | PGM5P4- | 2571805 | TTTCTCCCGCCCACCTTCTCCGCTGCCAGACCGCCCGAGCTG |
| | AS1 | | CCCTCAGTTTCTCCCCAAGTTGGACTCACTTTCGGGGTGTCCC |
| | | | ACAAGCCCGATCCCAGAGCCTGCT |
| 539 | PGM5P4- | 2571806 | CGACCTCGACGGCCGTCCTGCCGAAGTACCTGCCGTCGCTGC |
| | AS1 | | CCACCCCCGTGGTGCGGCCCTGACGGTCGCGCAGGTCGACG |
| | | | GACGACAGCGCGCTCCGGATGAAGTTGGGCGGGTAGCT |
| 540 | FTH1P2 | 2590365 | AGACTGTGATGACTGGGAGAGCGGGCTGAATGCGATGGAGT |
| | | | GTGCATTACATTTGGA |
| 541 | RNA5SP121 | 2602465 | CATAGTACTCTGAACATGCCCGATTTCATCTGT |
| 542 | FTH1P2 | 2629711 | TGACAAAAATGACCCCCATTTGTGTGACTTCATTGAG |
| 543 | SETP14 | 2648928 | ATGAAACAGACAGACTTAATGAACAAGCCAGTGAGGAGATTTT |
| | | | GAAAGTAGAACAGAAATATAACAAACTCCGCCAACCATTTTTTC |
| | | | AGAAGAGGTCAGAATTGATCGCCAAAATCCCAAATTTTTGGGT |
| | | | AACAACATTTGTCAGCCATC |
| 544 | SETP14 | 2648929 | TTTGACGAAACGTTCAAGTCAAACACAGA |
| 545 | SETP14 | 2648930 | GAGGTCATCAAAGATGATATCTGGCCAAACCCATTACA |
| 546 | TIPARP | 2649130 | GCGTACAAGGCCCACGAAATAGTCGGCCGCCGCAG |
| 547 | TIPARP | 2649131 | ATAAGTCCACCGCACAGAACTCGCGCGCCTCCCCTCGAACGA |
| | | | ACGCGCACGCGCGCGCAGGGGGCGGGTCTTCTTCCCGACAC |
| | | | CCACTGA |
| 548 | TIPARP | 2649132 | CTCCGCCTCCGCGACGGGCCGTCGGGAGGAGGCGACCGGAA |
| | | | GCCACTTAAAGCAGAGATCGAGGTGACAGGCGAGCTGGCTG |
| | | | GACTCGGA |
| 549 | TIPARP | 2649133 | CGCGGTCGAGGCTTTCTGCGTTCGCGGCGGCGGAATGGCCC |
| 550 | TIPARP | 2649134 | TCTGTGGTCCCTAGACGTCGGCTCCCGCCCTCGGCGCTGATC |
| | | | TCCGGCGCGGGCACTGCTTTCCACTCGGCTCCTGTCGTCCGT |
| | | | TCTCTCAGG |
| 551 | TIPARP | 2649135 | GGGCGCGTCTATGCGGCCTCCCCCGCGGGCCGACCCCGGGT |
| | | | GCTCTGAGGCGCCTAGGAGC |
| 552 | TIPARP | 2649136 | GGCACGGCAGCTACGGGAGCCTTCCGGCTACCCCGCGTTTC |
| | | | GGGCTGCAG |
| 553 | TIPARP | 2649137 | CATTAACTTTGAGAGCGCACAAGTCTTCGTCTTCCTCCCCGCC |
| | | | GCCGCGGGAAGCGCTCGCCGCCTTTCCCCCGCGCTTCGCGG |
| | | | CTCAGTTCTGCGAGCCCCCAAGACCCGTTGGACGCTCCTCGG |
| | | | G |
| 554 | TIPARP | 2649138 | CTCAGCTGCACTGCGCGGAGTTGGCGCGGCCCGGGACCAGG |
| | | | AGCTGAGCAAACCGCCGCGGCCAACAGGAGGCGTCACTCGG |
| | | | ACCCGGGCTCGGCGCCGGGGTGTCGCGCGGCGGCGGGCGG |
| | | | GCAGGCTTTGGAGCGGCAGTTTTTTCGGAAAGTGC |
| 555 | TIPARP | 2649139 | ATGATCATCTTCCTTCCTTTCCTCGTAG |
| 556 | TIPARP | 2649140 | GATTTTTAGACTCTGAGGAGCAGTTGGAGCTAATCCACATT |
| 557 | TIPARP | 2649141 | CAGACTGTGTAGTGCAGCCTCCCTCTCCTCCTGATGACTTTTC |
| | | | ATGCCAAATGAGACTCTCTGAGAAGATCACTCCATTGAAGACT |
| | | | TGTTTTAAGAAAAAGGATCAGAAAAGATTGGGAACTGGAACCC |
| | | | TGAGGTCTTTGAGGCCAATATTAAACACTCTTCTAGAATCTGG |
| | | | CTCACTTGATGGGGTTTTTAGATCTAGGAACCAGAGTACAGAT |
| | | | GA |
| 558 | TIPARP | 2649142 | GGGGACCAGATACCGGAAGCCCATCCTTCCACTGAAGCTCCA |
| | | | GAACGAGTGGTTCCAATCCAAGATCACAGCTTTCCATCAGAAA |
| | | | CCCTCAGTGGGACGGTGGCAGATTCCACACCAGCTCACTTCC |
| | | | AGACTGATCTTTTGCACCCAGTTTCAAGTGATGTTCCTACTAGT |
| | | | CCTGACTG |
| 559 | TIPARP | 2649143 | GTATTTATAACAACTTGTAGAACTGTTG |
| 560 | TIPARP | 2649144 | AAAACTTTGCAGAACAGCGGCTCCCACTTCACCTTCATGAAGC |
| | | | AAATTTCCAGTCTGCTGAGTACTTCAG |
| 561 | TIPARP | 2649145 | AAGTTGACTTGTGGTCATTGCAACCTGGTTTT |
| 562 | TIPARP | 2649146 | ATAACGGCATGTTGAGCCTTGCTGAGAGATTCACAAACAAGCT |
| | | | GGAGCAGCCCAGGTTCACATGGTTACCACATTATTTGGCTAAA |
| | | | GCTATTAATCTCTGTGGTCAGGCCTGTAAAGCTGGTCTATCTG |
| | | | TGCAGATTGCGCATAACCAGGAAGT |
| 563 | TIPARP | 2649147 | GCCTTCTATCCCAGCTGTTCTTACAGAAATTAAGTTTCACTTTC |
| | | | TCATCAGGCTATGGTTGAGAAGTATGTCTCATTTATAGTGCCTT |
| | | | CTGTGATCTTAGGACATGTGACTA |
| 564 | TIPARP | 2649148 | TGTGATTTCAGACAGCATCCTTCTCACTAACTTGCTGCCTTCTT |
| | | | GGAATAAGAATTTCCAAGATGTCTCAGGAGGTACCAAGGGAG |
| | | | CAGCAACAAGGCCTAATGATCACTTCTTCAAGAATTTATCCCA |
| | | | AGAAATGCATTGTATCTTAAGTTGGGGAACACTTTTACCTACTC |
| | | | AAAAATCTTTTGAGGTATTCAGATAAATCCATGATCTGAGTTTT |
| | | | ATGTTAATAGTTTTACAGTGTCATAGTGTGGTAATTAAGTGTAG |
| | | | AATTTTAACCTCTGAGGCTGGGCGCAGTGGCTCACGCCTGTA |
| | | | ATCTTAGCTTTTTGGAAGGCTGAGGCAGAAGAATTGCTTGAGA |
| | | | CCAGCCCAGGCAACATGGCGAAACCTTGTCTCTACAGAAAAAT |
| | | | ACAAAAATTAGCTGAGTGTGGTGGATCATGCCTATAGTCACAG |
| | | | CTACTGGGGATGCTGAGGTGGGAGGGTAGTTTAAGCAAGGGA |
| | | | GTTTGAGGTGGCAGTGAGCCTAGTTGGCACTATT |
| 565 | TIPARP | 2649149 | GGACAAGAATTTTGGGCAGATTTGAATGCC |
| 566 | TIPARP | 2649150 | TTTGACCAACTACGAAGGCTGTCCACACCACCCTCTAGCAATG |
| | | | TCAACTCTATTTACCACACAGTCTGGAAATTCTTCTGTAGGGAC |
| | | | CACTTTGGATG |
| 567 | TIPARP | 2649151 | TGTCATTCGATTGATTGAAGAAGCCAACTCTCGGGGTCTGAAA |
| | | | GAGGTTCGATTTATGATGTGGAATAACCACTACATCCTCCACA |
| | | | AT |
| 568 | TIPARP | 2649152 | GGTGGGGTTCCCACACAAGCTCCTCCACCTCTTGAAGCAACTT |
| | | | CATCATCACAAATTATCTGCCCAGATGGGGTCACTTCAGCAAA |
| | | | CTTTTACCCTGAAACTTGGGTTTATATGCATCCATCTCAGGACT |
| | | | TCATCCAAGTCCCTGTTTCTGCAGAGGATA |
| 569 | TIPARP | 2649153 | ATGAAAAGTTCAAGACGGCCGGGCGCAGTGGCTCAAGCCTGT |
| | | | AATCCCAGCACTTTGGGAGGCCGAGGCGGGCAGATTACGAG |
| | | | GTCAGGAGATCGAGACCATCCTAGCTAACACGGTGAAACCCC |
| | | | GTCTCTACTAAAAATAGAAAAAATTAGCTGGGCGTGGTGGCGG |
| | | | GCACCTGTAGTCCCAGCTACTCGGGAGGCTGAGGCAGGAGA |
| | | | ATGGTGTGAACCTGGGAGGCGGAGCTTGCAGTGAGCCGAGA |
| | | | TTGCGCCACTGCACTCCAGCCTGGGCGACAGAGCCAGACTCC |
| | | | GTCTCAAAAAAAAAAAAAAAAAAGTTCAAGAATCAAGAGAGCTT |
| | | | TATTGTAGCCAGTGTCAAATGAGGAACATAATAGTAAACATTTG |
| | | | CACAGAATTTATGTTC |
| 570 | TIPARP | 2649154 | CAGGAAAATGTTTGGCCGTGACAGGATAATAAATG |
| 571 | TIPARP | 2649155 | GACCCTCGAGTCTGTGGAAAGCATGC |
| 572 | TIPARP | 2649156 | TCCAAAGGAGTCCACTTCATGTTTCTGGCCAAAGTGCTGACGG |
| | | | GCAGATACACAATGGGCAGTCATGGCATGAGAAGGCCCCCGC |
| | | | CAGTCAATCCTGGCAGTGTCACCAGTGACCTTTATGACTCTTG |
| | | | TG |
| 573 | TIPARP | 2649157 | TACCCTTATTTTGTTATCCAATATGAAGAA |
| 574 | TIPARP | 2649158 | GCTTGGGCCTGGTAGAAGTTTGACCAAATGGAATGGAGGCTG |
| | | | TGAGCAATGTGAGGATTCTATTTATTTATTTACGTTTGATAAAA |
| | | | CTTACTGGAACTAGTACTACCATGCGTATTCCCTGTCCAAAGC |
| | | | ATCACTGCTTTGGTATAGTATAAGTTCATGAAATTCTGGTGGGT |
| | | | AGAAAGAAATTTTTATTTCTATCAGCAGTACTAAAATGTATCAG |
| | | | CCAACCAGAGAACATCAGTGACTTTAACTTCTGCAGAGTTTGC |
| | | | CCCAGAATTCAGAGTTCTATTTAGAGGAAGTTAAAACAACAAC |
| | | | AAAAAACAACCATTTGAAAAATTTTTGTCACCAGCAAAACTTTT |
| | | | CACTAATTAGTGATATGAAATGTGATTTTTGTGTTGTTAAACTT |
| | | | CAGCTTTGGAAAACTCAGTCTCTTTCATTATCATCCATTCCAAT |
| | | | TTGAAGGAGTTGGGCAGCTAATTTGGTTAAAGGCAGTCTTGAG |
| | | | GGTTAGAAGTATTACTTCCTTTTCGGGTTCCAGACCTAGCTTG |
| 575 | TIPARP | 2649159 | AAACTTGGAAATTGTGCCAGTGGTCCAGCTGGAGCACAACGT |
| | | | TTGGTGA |
| 576 | TIPARP | 2649160 | TCAGAGAGGTAGCAACTAGGTAAACTCCTTATAAAAAGCAAAT |
| | | | ACCTGGATTTACAAAAGTGAAAGTAGTTGTTCACAAAAGAATTC |
| | | | GCCATGGAATTCTTTCAGTTACCAAGCTCTCCTGGTAATGTTT |
| | | | GTGGTTATATCATTTACACAAAACTTTTCAGGAACTTCTGTGTT |
| | | | GTTTAAGCAAGATGTATCTGTACTGATGTCTCAGTGAATCAGT |
| | | | CTGTTTATTAAGCACTTATCAGGGCTTCCACACACTTATTTATT |
| 577 | SMC4 | 2650205 | ATGCGCAGGAGCGACAATAAGATGGCG |
| 578 | SMC4 | 2650206 | GCCATTTTCGAGTGAAGGACCCGGAGCCGAAACA |
| 579 | SMC4 | 2650207 | GTGGGTACTACACAACCGTCTCCAGCCTTGGTCTGA |
| 580 | SMC4 | 2650208 | GCCAGCGTCCGACTTGAAGTTGCTAGTGGTTAGTCCCAGCCT |
| | | | TCGCCCTTCGCGGTCCGACCGCTGAGAGGAGGGAGACTTCGT |
| | | | TATGCCCCGGGCCGTCAACGGCGCCAGGAGCTAAAGGGCGG |
| | | | GCAGACGAAAGCGGGCGGCGAGTCGCCAGTTAGTCTTCACC |
| | | | GCTCTGGAGAGAGTTGCTAGCCACGGGATCCTGACCCGGACA |
| | | | CGAACTCGTTTCTCCACGTCGGTGCGCGCTTGCATCCCTGGC |
| | | | CCCGAAAGCGTGGGAATGTCCGGAAATGCTGGCGTATGGGA |
| | | | GTTCCTTA |
| 581 | SMC4 | 2650209 | GCACGTCTAGATTTTCCCACTTACATAG |
| 582 | SMC4 | 2650210 | AGTCCTGCCTTCTTGCCACTCGTGTCTTTCGATGGCTCCCTTC |
| | | | CCGAAGTCCCGCTGCCTCTAAGCGGAGTGTTAAGCGGGGCTC |
| | | | TCGGAAGCCGGTGGACCGAGATTT |
| 583 | SMC4 | 2650211 | GGCGGGCGCGGTGTAGCGGCCCGCGGGCTGACTTGCTCCCG |
| | | | GCTGTCCC |
| 584 | SMC4 | 2650212 | ATGCCCCGTAAAGGCACCCAGCCCTC |
| 585 | SMC4 | 2650213 | CCCTGACGGCGCCAGCAGCGACGCGGAGCCTGAGCCGCCGT |
| | | | CCGGCCGCACGGAGA |
| 586 | SMC4 | 2650214 | CCTCCGTGGTGTTAGATTGCCGTTAAAGAGAAGACGATAATTT |
| | | | ATTTGAAGCCACTGTAGCTTTTGTGAGTCCAGGAGTTGGGTGA |
| | | | CATTATTAAACCCTCGTGGCAGTGTCGCTGAAGTTCATGAGTT |
| | | | TCCAAAATGAAGGTTCCAGGTGCTCAGCGGTACGGAGAATTG |
| | | | CATCTA |
| 587 | SMC4 | 2650215 | TGAGGAACTTGATAATAGAAGTTTAGAAGAG |
| 588 | SMC4 | 2650216 | CCAGAACTTCAAATCCTATGCTGGGGAGAAA |
| 589 | SMC4 | 2650217 | CGCTTTTCCTGTATTATCGGGCCAAATGGCAGTGGCAAATCCA |
| | | | ATGTTATTGATTCTATGCTTTTTGTGTTTGGCTATCGAGCACAA |
| | | | AAAATAAGATCTAAAAAACTCTCAGTATTAATACATAATTCTGAT |
| | | | GAACACAAGGACATTCAGAGTTGTACA |
| 590 | SMC4 | 2650218 | TTGAGAAAGGGACCAAAACAGCATGGAAAAGTATCAATTCTTT |
| | | | GCTAAGTTGGGTTATTAATGAGAACTACTGGCAGTTTGTGTGC |
| | | | ATGTTCAATTGAAGTTTTTAATCCATAGAATTAGTTTCAGTATGA |
| | | | AATGAGTGAATTTTGAAGTAGGCCTATGACTTAATACCAACAAT |
| | | | T |
| 591 | SMC4 | 2650219 | AAGGGGATGATTATGAAGTCATTCCTAACAGTAATTTCTATGTA |
| | | | TCC |
| 592 | SMC4 | 2650220 | AACGGCCTGCAGAGATAATACTTCTGTCTATCACATAAGTGGA |
| | | | AAGAAAAAGACATTTAAGGATGTTGGAAATCTTCTTCGAAGCC |
| | | | ATGGAATTGACTTGGACCATAATAGATTTTTA |
| 593 | SMC4 | 2650221 | CTGTAGCAGCACATCATGGTTTACATGCTACAGTCAAGATGCG |
| | | | AATCATTATTTGCTGCTCTAGAAATTTAAGGAA |
| 594 | SMC4 | 2650222 | GTAAATATTGGCGTAGTGAAATATATATTAAACACCAATATTAC |
| | | | TGTGCTGCTTTAGTG |
| 595 | SMC4 | 2650223 | GTGTTTGATTTACCTAAGCACCTAGTTAATTTAATCTTTGTAAC |
| | | | ACTTTGGATGGTTAACTTAACCTTTACTCAAGTTGGTTTTTGTT |
| | | | TTGTTGAAAATGACTTACTTGGTGGAACCACTACTACTGAAAG |
| | | | AACGAAACTTTGATATTACATTGTTAAGTATCAGAGCTGTTACA |
| | | | GAGCAAGTCCTTTTAAAGAGATGTAAAAATTAAGTACCTGTGC |
| | | | CAAACTGATTTTTATTAGAAACCCTGTTTTCTTTAAGTAAAAGTA |
| | | | TATTCTACCAGCATGGCTTGG |
| 596 | SMC4 | 2650224 | TATCCACAACTAGGGTGAAGGTGGTGGAGAGCAGCAAGGAAG |
| | | | CTACCTCTAACCAACCAGAA |
| 597 | SMC4 | 2650225 | CTCAAAGAGTGGTATAACTGGATCATAATATCCTTGTTTGCCAC |
| | | | TCAAGAAAGTGTTCCATAACTTAAGATAACAGTGGTGGGAAAA |
| | | | ATCATTTAAGACCTTGTTTCATATGCTTTAAGATACAAGAAATA |
| | | | GAGATAACACTGGGAACATATGAAACTTTGTCAGCATCAGATA |
| | | | ATAGTGTTGTAGCGACTTGAAACATTTTTTGTCTGTGATTGTGC |
| | | | CAGTCACTATTTGTGACTTGGATTGAACCTTGATATGACTTTAA |
| | | | ATTCAGGTTGATGTTTTAAAATTATTTCTGAAATATATTGAGCTT |
| | | | ATTGCCCTAAATTAAAACTATATTCTGTAATTTTACATGAGTTAT |
| | | | GTAAGTTTTCTGAAGAAATAAGGAGGAATCCTTTAGGCACAGA |
| | | | CTGTCAATCTACAGATT |
| 598 | SMC4 | 2650226 | ACTCTTGGCTTTATTATTTAACTGCTCCCAATTCTCACTTAAGA |
| | | | TTGATTTAGCTAAACATACAC |
| 599 | SMC4 | 2650227 | GAACAAATTGCTATGATGAAACCAA |
| 600 | SMC4 | 2650228 | AGATATAATTGGTTGTGGACGGCTAAATGAACCTATTAAAGTC |
| | | | TTGTGTCGGAGAGTT |
| 601 | SMC4 | 2650229 | GGAGAGAAAAACATAGCTATCGAATTTCTTACCTTGGAAA |
| 602 | SMC4 | 2650230 | GTAAGTGCCTTGATTGATATTACCAATTTTTATATTAGTTTTTAA |
| | | | CCATTAAGTCAAAGCCCTTCTCT |
| 603 | SMC4 | 2650231 | AAGGAATTATGTGGTGAACTTATCCAATGTGAGGACTATCTGG |
| | | | CTGTGACACCTGTCATCCCGTTGATCACCAGGGTTGAATTTAT |
| | | | TAAA |
| 604 | SMC4 | 2650232 | TTATGAGTTGCAGAAACGAATTGCTGAAATGGAAACTCAAAAG |
| | | | GAAAAAATTCATGAAGATACCAAAGAAATTAATG |
| 605 | SMC4 | 2650233 | GATAATTGTATTACATGTGTATTTATATATAAAGTTACTTCTAGC |
| | | | ACATTGTGAGTGTAAGACATTTGCCAGCATATCAAGTGGTG |
| 606 | SMC4 | 2650234 | CCCTAGTGGCGTAGCACAGTAACAAACAATAAGCATTTGGCTT |
| | | | CACAGTTTAATCTTTTAGTAGTCCACAAATCTGATAGAGGGATA |
| | | | GGATTTGGGTTTTTCTAGATAGATTTTTAAGGGTTTTATCATGT |
| | | | CCCTACTTGATGCCATTTTTCAATGACACTAGTATCTCTAATTA |
| | | | TTTTTAAATAAAAAAATTTGTATAGTAAGTTTATTGTATAGTAAC |
| | | | TTGTAAGTATATTCGTAAAAGGTAAAACCAAAATTTTACTCCTA |
| | | | TGGTAAAATTTTTATATACCTAGACATTGTAGTCACTGGAAAAT |
| | | | GTGTTATTTTCCCTCCAACTTAGAAAGGCAAAATAGCTGTCATA |
| | | | ATCAAAAATACAGGTGCTTCTTCAACTATGGGGAGAGGGATCA |
| | | | TCTTGGAATAAGGAGAGTTTTAGGATCCTGCCTTATTAAGAGC |
| | | | CTGGACATA |
| 607 | SMC4 | 2650235 | ATTACAAAATTTATTGAGGAGAATAAAGAAAAATTTACACAGCT |
| | | | AGATTTGGAAGATGTTCAAGTTAGAGAAAAGTTAAAACATGCC |
| | | | ACGAGTAAAGCC |
| 608 | SMC4 | 2650236 | TCCGTGTAGTCAGAGCATATTTATAGCTAAAGAAGAATAATTAC |
| | | | AACCTGAAATCAGGAGAGAAGGATGACAGACCTGAGGCCCTG |
| | | | CCAGAGACAGTTTTCCTTCATAAGAGGTCAGGTGTTTGTAGAA |
| | | | GTAGTTTTACTATTAGATTGAGAGAATATAGAAATTACAGTGAA |
| | | | TAGTCGGGAAAATACTTGTTAAAGCTAGCTAATTTAACTCTGAT |
| | | | TATAAAGAAAAGAAGAACTAGAGGACCCTGAGAAATGCCTTTA |
| | | | AATA |
| 609 | SMC4 | 2650237 | GCCAAGAGTAACAATATCATTAATGAAACAACAACCAGAAACA |
| | | | ATGCCCTCGAGAAGGAAAAAGAGAAAGAAGAAAAAAAATTAAA |
| | | | GGAAGTTATGGATAGCCTTAAACAGGAAA |
| 610 | SMC4 | 2650238 | TGAAACCTGAACTGGTAAGTTTGGACTTTTAATGTCCAACATTC |
| | | | CTAAAACTAGTCAACCTAGACTTAGATGACTATTCTTTTAATTC |
| | | | CTGCTGA |
| 611 | SMC4 | 2650239 | GTCAATGGATAATGCAGTAGCTTTCATGATGGGATACTTCATA |
| | | | GTTAGTGGATTTTCACTGTTTGCTTATTTAATATATATTGAGTAC |
| | | | TCATGTGCCCTGCACCCCATGTTAATGACAAAGCTAGGCCTCA |
| | | | AATGTCTTTATTCCTCAGCGTAATGATCGATCTCACAAAGCTCT |
| | | | TGTGAAATCAGTTGGGAAAAGACTATGTACAGTGAATATTGAC |
| | | | AACTAGGCAAAAACTGAATCTAGTCCACTTGTGAGAA |
| 612 | SMC4 | 2650240 | AAGCACGTTCAAAGATGGATGTAGCCCAGTCAGAACTTGATAT |
| | | | CTATCTCAGTCGTCATAATACTGCAGTGTCTCAATTAACTAAGG |
| | | | CTAAGGAAGCTCTAATTGCAGC |
| 613 | SMC4 | 2650241 | AAAGAATGAGGTCAGCATTTCAGTATTCCATATGTGAACTGAG |
| | | | ACTATCAAGAAACTATATTATCCCCAGAAGCACCATATAGTAAG |
| | | | TAAATCACCACCACCACCCCACTGTAGAAATAATTTAAACAAAA |
| | | | GAAAGTTTGTGTTTCTTTAAATCTTAAGTATAGACAATTTAAAG |
| | | | ATAAATAAAAAACAAGTGTATATGTATTTATATAATGAATATACA |
| | | | AACAACTATCTTAATGTGTTTTGGGTTTTGAATTTATGGATGTA |
| | | | GTTTCTTTGCTTGCATTCCAAAATGTTATAAACTAACTAAGATG |
| | | | TATAGCTTATCGGTGCCTGTCCCCCATCCTTGAGTGAATTAGA |
| | | | TGTCTAAGGAATTTCGTAAACTTTAATCTCCAAAGATCTCCAAA |
| | | | ACCTCAGTA |
| 614 | SMC4 | 2650242 | AAGAGCTCATTAGCAATGAATCGAAGTAGGGGGAAAGTCCTT |
| | | | GATGCAATAATTCAAGAA |
| 615 | SMC4 | 2650243 | TGACAACCATATTTCAAGTGTCACTGTATATAAAATAAGATTCA |
| | | | TTTTGTTTGTTTTAAGGCACATTTATTTTTAAACATTTTGCCCTT |
| | | | ACAGTTTCTTGTTTACTTAGCTTTAGATAAATACAATTATTTCAT |
| | | | ACATATCAAGAAAAATACTAGTAATGTCACACAAAC |
| 616 | SMC4 | 2650244 | GGGGACTTAGGAGCCATTGATGAAAAATACGACGTGGCTATAT |
| | | | CATCCTGTTGTCATGCACTGGACTACATTGTTGTTGATTCTATT |
| | | | GATATAGCCCAAGAATGTG |
| 617 | SMC4 | 2650245 | GGCTGTATGGGCGAAAAAGATGACCGAAATTCAAACTCCTGAA |
| | | | AATACTCCTCGTTTATTTGATTTAGTAAAAGTAAAAGATGAGAA |
| | | | AATTCGCCAAGCTTTTTATTTTGCTTTACGAGATACCTTAGTAG |
| | | | CTGACAACTTGGATCAAGCCACAAGAGTAGCATATCAAAAAGA |
| | | | TAGAAGATGGAGAGTGGTAACTTTACAGGGACAAATCA |
| 618 | SMC4 | 2650246 | GAAGAATGGGTTCCTCACTTGTTAT |
| 619 | SMC4 | 2650247 | CAGTTGCAAAACGACTCTAAAAAAGCAATGCAAATCCA |
| 620 | SMC4 | 2650248 | GTGAACGAGAAATGAGGAACACACTAGAAAAATTTACTGCAAG |
| | | | CATCCAG |
| 621 | SMC4 | 2650249 | GGAACTTGAAGCTAATGTACTTGCTACAGCCC |
| 622 | SMC4 | 2650250 | TACTGGCCAGGCTTTGTTTTAGGTCCTACTGATAGAGCAGTAA |
| | | | ACAAAAATAAAGTCTCTTCCCAGGGAGCACACATGTAAGATGG |
| | | | CACATATTTGAGTGGAGGCCCAAAGAAAGTATGAGTGCTAACC |
| | | | CATGTATGTTTGAGAAAAAAGCATTCCAAGAAGAGTATAAAGG |
| | | | AGCAAATACAAAGGCTGAAGCAGGAGTATGCTGGGAACACAA |
| | | | ACCATTGTGGCTGGAATAAAGGACGGAAGAACCCAGATTCTCT |
| | | | GAGGCCTTCACCCACACTCCCCTTTCCCTGCAAGCACCCACA |
| | | | ACAATGGCTTTGATGGTACCTGATGGTCAATTGAGAAGCCAAA |
| | | | ATGTATATCTGTGCTATTAATGGCAACATTTTCATGGAGAGACT |
| | | | GCAAGAGTCTATATGTGTTTCATCCTTATTTGAAAAGGAATCCT |
| | | | TGACTTTGTTAGGAGCTCTATATATCTCCTCTCATAGAAATGCC |
| | | | ATATATTATCAGGAGACTGTTAATATCTCATGTGGAGGACCCA |
| | | | TTTGTGCAAGCATA |
| 623 | SMC4 | 2650251 | ACTTTTACTCTTCGTTGTCACAGGAAGGAACGCTAATTCATCTT |
| | | | ATATCCTCCACTTTGTTTTAATGTGGAGAACTGCGAAGTTATGT |
| | | | TAGCAGAAGAAAATAACCACAATTTCTTCATTGTGGGCAAGTT |
| | | | AATATTGAGTTAGGCACATAGTGTATCTAAGGCTAAAAATCATT |
| | | | ATGAACTCAGTAGTCAAGGAAGTGCCCTAAGAAAAAGTTGTAA |
| | | | AGATATTTTAAAAGAAGCTGAGAACATGAAGCCATTAAGAAAT |
| | | | GGTGTGTTTACAGCCGAGCTAGTGTGTTTAACTTT |
| 624 | SMC4 | 2650252 | GCTGAGGTTAAACGCTTACACAATACCATCGTAGAAATCAATA |
| | | | ATCATAAACTCAAGGCCCAACAAGACAAACTTGATAAAATAAAT |
| | | | AAGCAATTAGATGAATGTGCTTCTGCTATTACTAAAGCCCAAG |
| | | | TAGCAATCAAGACT |
| 625 | SMC4 | 2650253 | GTAGAGTATGCATGTTACCCTAACTTGTTTTCCCTTTCCCTGCC |
| | | | TTCACATTGGAAAGGGGGTTACTATGTAATGTTCCATAAAATGT |
| | | | TTCTCTTACTGTTAATTTATTGAACCTGTCTGACACATTACCTAA |
| | | | TGGGACTTCCATGACGGAAAACCTATAATGAACATTTATCCTAT |
| | | | GGCCAATTAAAAAGGCTGGTAAACAGGTATGCCATA |
| 626 | SMC4 | 2650254 | TGTCTTGCGTACAGAGAAAGAAATAAAAGATACTGAGAAAGAG |
| | | | GTGGATGACCTAACAGCAGAGCTGAAAAGTCTTGAGGACAAA |
| | | | GCAGCAGAGGTCGTAAAGAA |
| 627 | SMC4 | 2650255 | TCCAGAAAGAACATCGCAATCTGCTTCAAGAATTAAAAGTTATT |
| | | | CAAGAAAATGAACATGCTCTTCAAAAAGATGCACTTAGTATTAA |
| | | | GTTGAAACTTGAACAAATAGATGGTCACATTGCTGAACATAA |
| 628 | SMC4 | 2650256 | AAGAGATTTCGGTTCTAAGCCCAGAGGATCTTGAAGCGATCAA |
| | | | GAATCCAGATTCTATAACAAATCAAATTGCACTTTTGGAAGCCC |
| | | | GGTGTCATGAAATGAAACCAAACCTCGGTGCCATCGCAGAGT |
| | | | ATAAAAAGAA |
| 629 | SMC4 | 2650257 | ATTTTCCCTATCATAATCTTTTCACAG |
| 630 | SMC4 | 2650258 | TATGAAGATCTTCGGAAACAAAGGCTTAATGAATTTATGGCAG |
| | | | GTTTTTATATAATAACAAATAAATTAAAGGAAAATTACCAAATGC |
| | | | TTACTTTGGGAGGGGACGCCGAACTCGAGCTTGTAGACAGCT |
| | | | TGGATCCTTTCTCT |
| 631 | SMC4 | 2650259 | GTTCATTGGCTTTAGTATTTGCTCTTCACCACTACAAGCCCACT |
| | | | CCCCTTTACTTCATGGATGAGA |
| 632 | SMC4 | 2650260 | GTGATTTACCTGTTATTACTTAATGT |
| 633 | SMC4 | 2650261 | GCACAGTTCATAATAATTTCTCTTCGAAATAATATGTTTGAGAT |
| | | | TTCGGATAGACTTATTGGAATTTACAAGACATACAACATAACAA |
| | | | AAAGTGTTGCTGTAAATCCAAAAGAAATTGCATCTAAGGGACT |
| | | | TTGT |
| 634 | SMC4 | 2650262 | TTCAAGTTGATTCAGTGTATTACTGATTTTTTTCTATTTGTAAAG |
| | | | GATTATGAGTTGTATAAAATACATACTCCCTAAACTAGA |
| 635 | SMC4 | 2650263 | CAAGGTTGTGCTATCAAGGCTCAGCATACCTTCGTGGGCCTTT |
| | | | GATTTACCAACACTGGAAATGCCTGCCAACTAATCTTGGATAG |
| | | | ATTCTTTAAGGCATTCCACTTAGCTTGCCAGTTGA |
| 636 | SMC4 | 2650264 | GCCTAGGCTATCTCGTAAGTTGAAAAATATCCCACTATAGTTG |
| | | | CTTCATGAGTATGAAGTAAGATGGCCTCTGATTTACACTGGTT |
| | | | CAATTTACAAATTTTCAACTTTATGATAGGTTTATCCGGGTACT |
| | | | AAATGCATTTCAACTTGATAGTTTCAACTTATGATAGGTTTACC |
| | | | AGGATGTAGTCCCACTGTTGAGGAGCATCTATTTAGGGGTTAA |
| | | | TTACTTTAGTAATAAGTGGAAAGTAAGATACCTTGAGTAATGTT |
| | | | TGCCTATAAAATTGTCAGCGTATTTTTACACTATTGGCTCAAGA |
| | | | ATGTTATAATGCTAAGGGACATAAGTTGGCAACCACTTGGTTTT |
| | | | TGGAAGGACTTTCGGTATTGTATTAGAAGTCTGCCCTAGCTGT |
| | | | TAAATTTCTGG |
| 637 | SMC4 | 2650266 | GATGTAACTATTTTGCTTTGTAAATATCCTGCCTTTAA |
| 638 | SMC4 | 2650267 | TGTTTCTTAATAGCTGTACTCTATCTCTTCAGTAAGTAATTTGC |
| | | | CAGGAGAAATACAATGTTTTTAAGGAATATTTTTGTCAGCGTAA |
| | | | ACTGTTAAACACTGAATCCCAACTTTTAGCTATCTGAAAAATGT |
| | | | ATACTTAAATAATACATTATGGCCATTTGACTCAAATGTAAGTT |
| 639 | LIPH | 2708858 | TCTCTTTCCTGGTAAGCAGGGAGTCAAAACAATAGCAAGAAAA |
| | | | TGCCAGAAATAGAATTTCTACTACTTTGTAAACTCTAGGCTCGT |
| | | | GGGTCTCCTAGCTCTCAGTACCTGGCTCACTGTAGGATGGGT |
| | | | AGATGGGTGAATGAATGGATAAAGAAAGGAAGTTTGTTCACCG |
| | | | GAGAGGAGATGAATTTCAGTAAGTTTCATGTAACAGTGATCAG |
| | | | GAGAAATA |
| 640 | LIPH | 2708859 | GGCTGTCACCTATTTTGCCAACACGTGAATTCAAAACATGAAC |
| | | | CGGTTTGCTTTTGGAGAATCTGAAGACTCCAGTTTGAGGAATC |
| | | | CTTTGCTTCCCTGGAGGTAGATGCTGTCTGCAAATCTAGAATG |
| | | | ACAGCAGGAGTCCAGTCAAGAGGTCCTGTCAGGCCAAGGCCA |
| | | | GAAAGAAGGGAGGACAATCCCTGGGGCCAGATGCCCAGTGT |
| | | | GAGGGGAGGCATGATCTGTCCCATGGCTGTGGCCACTGCAG |
| | | | GAAGGTCTGTGAAAAGGAGGTGACAGGCCCAGTCACCTCCTC |
| | | | TTCACCCAAGTGATTGCTCCTTCAACTGCTATCTGTGAAAATAG |
| | | | CCTTTGTTATGAAGAAATTGACTCTCTCTCTCTTTTTTTTTTTTT |
| | | | GGAGTTGCCTAGGCTGGAGTGCAATGGTACGATCTCAGCTCA |
| | | | CTGCAACCTCCACCTCCCAGGTTCAATTGATTCTCCTGCCTCA |
| | | | GCCTCCTGAGTAGCTGGGATTACAGGCATGTGCCACCACACC |
| | | | CGGCTAATTTTTGTATTTTTATTAGAGACAGGGTTTCACCACGT |
| | | | TAGCCAGGCTCGTCTCGAACTCCTGTCCTCAGGTGACTACCC |
| | | | GTCTCGGCCTCCCAAAGTGCTGGGATTACAGGCATGAGCCAC |
| | | | CACACCCGGCCAAAAATGGATTCTCTATG |
| 641 | LIPH | 2708860 | CTGCTGGGACTAGATAGTGGATGAAGAAAGAAGGACGAGGAA |
| | | | GCCGTGGGGCAGCCTCTTCACATGGGGACAGGGGATGGAGC |
| | | | ATGAGGCAAGGGAAGGAAAAGCAGAGCTTATTTTTCACCTAAG |
| | | | GTGGAGAAGGATCACTTTACAGGCAACGCTCATTTTAAGCAAC |
| | | | C |
| 642 | LIPH | 2708861 | TCGGGCTGTTTGCTCAGGGAAGGCAAGAAAGCCACGTGCTGG |
| | | | CCCTCTGCCTT |
| 643 | LIPH | 2708862 | CAAGGCTTTTTTCAGTAGCGTCCTATGGATGTCACATTGTACAT |
| | | | CAAACAACCTTGTGATTATAAAACGATCCTGGGAAGGAGCCCC |
| | | | TAACTAGGGCAAGTCAGAAATAGCCAGGCTCGCAGCAGCGCA |
| | | | GCGCTGTGTCTGCTGTGTCCTGGGGCCTCCCTTGTTCCGACC |
| | | | TGTCAATTCTGCTGCCTGTCACGCGGGTGGTTCTGCCCATCG |
| | | | CGGCTGCGGGTCAAGCATCTTCAAGGGAAGGACGGACTGGA |
| | | | GGCCTCACCGTGGACTCAACTCTGCATTC |
| 644 | LIPH | 2708863 | GCCTCAGCTGTGTCGGTATGATCTTGTCCTGATGGAAAACGTT |
| | | | GAAACAGTCTTCCAACCTATTCTTTGCCCAGAGTTGCA |
| 645 | LIPH | 2708864 | CTCTAATAGGCCCAAGGTACAAGCTCAGGATTCTCCGAATGAA |
| | | | GTTAAGGTCCCTTGCCCATCC |
| 646 | LIPH | 2708865 | TCAGAAATATCACCAAGTGAGTCTACTTGCAAGATTTAATCAAG |
| | | | ATCTGGATAAAGTG |
| 647 | LIPH | 2708866 | CTTTGTGGATATTATAACATGGAACAAGAATGTAAGAAGAGGG |
| | | | GACATTACCATCAAATTGAGAGA |
| 648 | LIPH | 2708867 | TATTATGCTGATAATTGGAAAGACCATCTAAGGGGGAAAGATC |
| | | | CTCCAATGACGAAGGCATTCTTTGAC |
| 649 | LIPH | 2708868 | ACCACCAGAGGTCTGTATACCTGTACCTGTCTTCCCTGAGAGA |
| | | | GAGCTGCACCATCACTGCGTATCCCTGTGACTCCTACCAGGAT |
| | | | TATAGGAATGGCAAGTGTGTCAGCTGCGGCACGTCACAAAAA |
| 650 | LIPH | 2708869 | CTGGGCTACAAGGAGCCATTAGGAAACATAGACTTCTACCCAA |
| | | | ATGGAGGATTGGATCAACCTGGCTGCCC |
| 651 | LIPH | 2708870 | CTGCACCCGACCTATATATACATTTCTAGGTCCTCATTTTCTAG |
| | | | AAGTAGTTCCAATCTTTTTACCATCCTAGCTCTCAAATATTTAAA |
| | | | GATTTTATCTACTAAGTAAACATTCATTTTTTCCTGTATCCTATT |
| | | | TATTAGTTATACAAATGCAAATAGAGGCTCAGAAGCACCAGGC |
| | | | AATTAAAGGGTTGCAGC |
| 652 | LIPH | 2708871 | CCTGCAGGCCCTTTATTCAACGGGAAACCTCACCAAGACAGAT |
| | | | TAGATCCCAGTGATGCGCAGTTTGTTGATGTCATCCATTCCGA |
| | | | CACTGATG |
| 653 | LIPH | 2708872 | TGATGACATTTACATGATCGGAGTAAGTCTAGGAGCCCACATA |
| | | | TCTGGGTTTGTTGGAGAGATGTACGATGGAT |
| 654 | LIPH | 2708873 | TTACAATGATGGACCTCTTGAAATTCCA |
| 655 | LIPH | 2708874 | AGGCTGATGCTCTACACAAGGAAAAACCTGACCTGCGCACAA |
| | | | ACCATCAACTCCTCAGCTTTTGGGAACTTGAATGTGACCAAGA |
| | | | AAACCACCTTCATTGTCCATGGATTCAGGCCAACAGGCTCCCC |
| | | | TCCTGTTTGGATGGATGACTTAGTAAAGGGTTTGCTCTCTGTT |
| | | | GAAGACATGAACGTAGTTGTTGTTGATTGGAATCGAGGAGCTA |
| | | | CAACTTTAATATATACCCATGCCTCTAGTAAGACCAGA |
| 656 | LIPH | 2708875 | TATTCATCAGTTTGTTGTGCTTGTCAAGA |
| 657 | LIPH | 2708876 | CTCACTGTGAGCAAAATCCCACAGTGGAAACTCTTAAGCCTCT |
| | | | GCGAAGTAAATCATTCTTGTGAATGTGACACACGATCTC |
| 658 | PART1 | 2811146 | TGCAATGTCAGCTATTTAGGACAGAAACATCCAAGGCCGTGTC |
| | | | AGAACTCAATTACGACTACATATGCATTA |
| 659 | PART1 | 2811147 | ACGCCAACTATAGGACTCGTGCTTCTCGTACGCTGGGCTATAA |
| | | | TCTATGAAACTGAGCTCCAG |
| 660 | PART1 | 2811148 | CCTCATAACAAGTCTAACTGGCTCTGGAAA |
| 661 | PART1 | 2811149 | ACAGATGAGATATTCTACACATTAATCTACTTATCTGGAATCAC |
| | | | TTT |
| 662 | PART1 | 2811150 | CACAGCTTCCTTGTCGGAGGGGAAAAGGACAGGTGATCTGGG |
| | | | GAAAACGCAGCTACACCTGGAGCAAGGTCTCTTCCCGGCTTG |
| | | | GCAATCTCAGCTGTGCCGGCGCTAC |
| 663 | PART1 | 2811151 | CTGCTGCCTTCGGTGACTATATGAGAATGGAAACTTCTAAGGA |
| | | | AGCCAGGTTGTTAGAATTGTTACCCCCTTTACTCAGAGATAAC |
| | | | ATAGATTATCCAGGCTGA |
| 664 | PART1 | 2811152 | AATTTTCAACACAGACTCCCTGCTTCTCA |
| 665 | PART1 | 2811153 | TGTTCAAATCTCCATTTGTTGACAGACAAAGCCAACAATACTCT |
| | | | AAACTGAGGCCTGCAAGTCATTTCATT |
| 666 | PART1 | 2811154 | TTCACCTCCTACAACTCCGAAGAAAACCCTTACTGTCCAAGAC |
| | | | CGTCACCAGCAACCATCCGCAGTCATTCAAGTGGAAGCTTTCA |
| | | | CAGCTTTTGTACATTCTCTGTGTCAATATACAACTGAGTTACAG |
| | | | ACTGTCCC |
| 667 | PART1 | 2811155 | CATCAGGACTTGTATTAGCAGGTTCTGGCTAGAGAGACTATCT |
| | | | CCTGTCATCACGATCAATTAATGTTTTCTGGTGATCACATCAGG |
| | | | CCCTATCTAAGAAGCTCATGGTATACAAGGGTCACCCAAATAG |
| | | | CTGAGTGCAGTCCTTGCTCATATTTCCTTCATCTTAACCCCGC |
| | | | AAACAAGAATTAAGATGATCCCAATAAAAGAAAAATTGCTCAG |
| | | | GAAACTGAACCTTTTTCTGAACCAAGCACTGTCAGCAAATCTC |
| | | | AGGTATTAGAGCAACTATGGTTGATTGAAAAGTGTCTCAAAAT |
| | | | CTGGGCCAAGAATGATTGCTAGGTCCATAAGCTAATTTGTCTG |
| | | | GCCTTGCCATTTACGTAAGCC |
| 668 | PART1 | 2811156 | TGGGATGGCCGTTCAGGAAATCTTCTGTTTGCTTTGCACGCTC |
| | | | CTGAGTATAGGACAAAGCGCTGTTGTTTAAGAACATAAATAAC |
| | | | AAAAGCTTTGTTCTTCCAAACCGAGAGGGAAACTGTAGATCTA |
| | | | TCCAAAATGACTTGGTCTTAAACTGCCTAAGGATGACAAGAAT |
| | | | GAAATATTATTTTAGGCTGCCCATCAGCATCCGTCTCTCAATCT |
| | | | CCTGTCTTGGCTTCAGAAAACAATGACTCAATATGGTCTTTTTC |
| | | | TGACACATTGCAGCCTTAGGA |
| 669 | PART1 | 2811157 | TGCTCTTCTTGGTCCCACTCAAATGGGAAGTTCTGCTCGAGGC |
| | | | CAGAAATAGAAAACAGGAAGTCAACAGAACTGATTTTCCTAAC |
| | | | TGCCCAAATGCAAATCACCACACTCCGTTATGGATGAGAATT |
| 670 | PART1 | 2811158 | TTGCCCTCACATACACATAAGTTTGTCATTGTTCTTCAGTTCTT |
| | | | TGGGTAATCTCTTCCTAGAAACTGCATCTAACAAATAGACCAC |
| | | | ATCCCCAAATTCCATCATGTCCAAAAAGAAGCACGGTATTTCC |
| | | | ATCAACACCCCAGCTGCCATCACCAAGCCAACTCGCCTGACTT |
| | | | CCATTCACTTACTAGCAAACATTTACCAAGTATCTGCCATGTTC |
| | | | ATTTTGTCAATGAGAATGACATGGGACTTGTTCCTCTAGGAGA |
| | | | TCACAGTCTA |
| 671 | PART1 | 2811159 | CCTGCTGCCCAATAACCTGATGTTGTCACTCTCATATTTAAAAC |
| | | | CCATAAGTGCTGCCGGGAGCGGTGGCTCACGCCTGTAATCCC |
| | | | AGCACTTTGGGAGGCCGAGGCGGGCGGATCACAAGGTCAAG |
| | | | AGATCGAGACCATCCTGGCCAACGTGGTGAAGCCCAGCCTCT |
| | | | ACTAAAAATACAAAAATTAGCTGGGCGGGGTGGCACACACCT |
| | | | GTAGTCCCAGCTACTTGGCAGGCTGAGGCAGGAGAATTGCTT |
| | | | GAACCCGGAGGCAGAGGTTGCAGTGAGCCGAGATTGCACTAC |
| | | | TGCACTCCAGACTGGTGACGGAGCGAGACGCTGTCAAAAAAA |
| | | | CAAAACAAAACAAAAAACATATCAATGCTGATGAACCAAGTGC |
| | | | AAAGCCCTGAGCTTGGCCAGGCAACATAGCCTGGAAACCTGA |
| | | | CTTTTAATCCTTACTTTGCTCTATTCCCCCAACATACACACACT |
| | | | TCATACACCACACCTAAAAGAGACTTCCCACAGTTTTCCAAAA |
| | | | ATGACTCACATTTATATTTCCTGTTTTTCCCTTTGCCCACCCTG |
| | | | CCCTCTCTCCCTCTGCCTTCATTTTTTTAATTAACCTCTGGAAC |
| | | | TCAGGTGCTCCTGCTCCAAGGTTTAGGTCAAAAGTTACCTCCT |
| | | | CCATGAAGCTTTCTCTCATTCTCCCACAATGTGTGAAAGCCCC |
| | | | ATTCTCAGATTTGCTTAGTTGTGCATTTGTATATTCTACCTTGC |
| | | | ACTACAGTCATTTGTATATTTATCTTATGGTTTCTGTGCCTTAG |
| | | | GAAAGGTACACTGTCTTAATCATCTTTGTTCAATACAGTGCCTA |
| | | | GCAGAGTGCCTCAAGTATAATATGTGCTCAATAAATAATAGAT |
| | | | GCATTTTTCCATGCATATTTTCTACTATATCGAAGTGGAAAATA |
| | | | TATCCATGTGATATAGTGAAAAATATCTCATGAAGAGAGATACA |
| | | | GTGAGGAAAATATCTCATGAAGACCAAAAAGCAGAAATCCAAG |
| | | | TTTTTTCTTTTCATTACTATCATCAGTGATTATTAATTTTATGTGT |
| | | | CAACTTGGTTGGGCTTAGGGATGCTCAGATAGCTGGTAAAATA |
| | | | TTATTTCTGGATGTGTCTCTCAGGGTGTTTCTGGGGGAAATTA |
| | | | GCATTTGAATCAGTAGACTAAATAAAGAAAATCTGCCCTCACA |
| | | | AATGTGAGCCAGCATCATCCAATTTATTGACAGTTTAGATACAA |
| | | | CAATAAGGCAGAAGAAGGTGAACTCTCTTTCCTTGAGCTGGGA |
| | | | CATCCATCTTCTCCTGCTCTGACATTGGAGTTTCTAGTTCTTGG |
| | | | GACTTCAGATTCTCCCCTGAAGTTTCTCAGGCCTTTTGGCATC |
| | | | AGACTGGAAGTTATGCCATTGGCTCCCCTGGTTCTCAGACCTT |
| | | | TGGACTCAGACTGAATTATACCACTGGCTTTCCTGGTTCTCCA |
| | | | GCTTCAAGATGACATATTGTGAGACTTTTCAACCTCCATAATTG |
| | | | CATGAGCCAATTTCCACAATATATCTCCTCTTATGTATCTATAT |
| | | | ATTTCCTATTGGTTTTGTTTCTCTACAGAATCCTAATAGATCATC |
| | | | TAATTGTTTATCTAACAAGTATTTTCCTCCCTAGACAATATGTTG |
| | | | GGCACTAGGGACACAAAAATAAAAACACAGACATCTGCACTCA |
| | | | ATAAACTTACATTCAATATCAGAGAGATTGGCACAGAATACAAA |
| | | | TAAAATGAGATACATGCAAAATAATATGAATTGCAAAATTACGG |
| | | | CAATTCACCACCAACTAGGTGTGTGACCGTGGGAAAATCACAC |
| | | | TGTGAGCTAAATATTAGCAAGTTTAAAATGCAAAATCAGAGGC |
| | | | AGTCTATGAATTGGACTTTGCTAATGGCCTCCTTTGCTGATGG |
| | | | ATGGCACATTGGTGTTAGAAAGTGCTTATTTTTGCAAAGGTCC |
| | | | ATTATTGATGCTTTAATTCTAAGGAAATTATGTAGGCAGAAACT |
| | | | AAAGAAAGGTTAAAAAAACAGCAGCTAAAATTGATACTTAGAC |
| | | | AATAAAAAACTAATTATAAGTGATTTATCAGCACCACTAGATAA |
| | | | CTACATTGGTGAAATTTAAGGCCATGAAATGCAGGACAAGCCT |
| | | | CGTAGGAAGCAAGGTCCCAGTGGATGAGATGCTGTCCTCTGG |
| | | | GCTCCTAACCTTCCACCACTAGTATTCACCATATCTGATTGGAA |
| | | | ATGTGTGCATGTGAGTCGGCCTCCCCTCTATGATGTGAGTAG |
| | | | GGACCTATTTTTGCTCATCTCTGTATCCTCTACACACGATGCTT |
| | | | GG |
| 672 | PART1 | 2811160 | GGAGCTAAAAGAAGAAATAGTCAAAATTTTCTAAATGAG |
| 673 | PART1 | 2811161 | CTGCCTTGTACTTCATGCAGGTTGAACAGAAATGTTTTCTGAG |
| | | | CATGTATTGTTACAGCCCTCTGAGATGGTATAAAAGAATGAAA |
| | | | GAAGACACGACCTGCCTTCCAGGAGTTTCACA |
| 674 | PART1 | 2811162 | AGGGAAAAGCATTTCTAATGGAGGAGATGGCTGTGGAGAGGA |
| | | | GAGG |
| 675 | PART1 | 2811163 | ACCTTCCACCCTTTCACTATGAAGGACCCTCACCA |
| 676 | PART1 | 2811164 | AGATTGCATATGTATTGGGAAGCTCCTGGG |
| 677 | PART1 | 2811165 | TCCACTTTCCTGTGAGGTCAAATGCGGTAAAGGGATGCTCCAA |
| | | | CCCTACCCTCCATGTACCTGCCTTTCCTGTGATTCCGAAGAAG |
| | | | GGGTGG |
| 678 | PART1 | 2811166 | CTATTAATTAATCCAGAGAAGTGTGTTGCTATAAAATATTCTGT |
| | | | GAAGCATTTTCACTTATT |
| 679 | PART1 | 2811167 | TTTGAAGAACTAGAGAAAATCATCAT |
| 680 | PART1 | 2811168 | GGGATTTGCTGGCATTGATTTCCCAGGATGGCAAAGTGCTAAG |
| | | | AACTAAACCTTTAAAGCTAACAAAATGTACTGATGTCTTTGCAA |
| | | | AGTATCCAAGACCAACAAGAAAGTAATTTCCCACCTCACCCTA |
| | | | CCACCACCCAGAAAAGGAGCACAGAGATGGGGAAGAGAGTG |
| | | | GCTGCATCTGGCATCCAGCCAGAGGAGTCCGTGCAGGGATTC |
| | | | T |
| 681 | PART1 | 2811169 | GATGATGCAGCTCCCTCAAGTATCACATGAAGATAGTGG |
| 682 | PART1 | 2811170 | CAGCAATGTATGAGGTCCAAGGACCAGGACCAAAGGGAAAAA |
| | | | CAGCCATCTCACCAGACACCTGCCTACGACCAGATGCGTCAT |
| | | | CTCCAATATTAGCTAACTCCCTGGAACCTGGACTCA |
| 683 | PART1 | 2811171 | GGCCTCTCAATCAATTACAAAACTGAGAATTCTGACAGTTTTGT |
| | | | GTATTTCCTCTTTGCATGTGATGTATATGTGTGTATTTGTATATA |
| | | | TTAACCATTTTCCTTTTTCTCTCTTCATTATTTTATGAAAGTTGT |
| | | | TGAATATAAACTCTACAATTTAGCCTTTAGGTAAGAGAATATTC |
| | | | AGTGGGACTTTGATTTGAGGAGTATTTAAGACAGCCAGATGAG |
| | | | ACTACGATAACTGTTGGAACTGTGTGTCTCCTCATTTGGGGAA |
| | | | AGGGGTGAGAACTCTGCATTTCTCTGAAGAACAGAGTTGACTT |
| | | | TGTGTTATACAGAGTTCAAATATATATATAAAATGGTGCATGTG |
| | | | GAAGCTAAGAAGCCAAAGGAGTTCACCAAGACAGTTATCAATA |
| | | | TATTGCCTCTCCGCTCCAAATCCACCCTTCTTTGCCCTGTTCC |
| | | | ACGATACTAATCTGGCTCCTCGGTCAGCCAGTGCAATGTCATC |
| | | | TGTTGCTGGTAGAGTGTA |
| 684 | PTTG1 | 2838202 | TTAAACCAGGAGTGCGCCGCGTCCGTTCACCGCGGCCTCAGA |
| | | | TGAATGCGGCTGTTAAGACCTGC |
| 685 | PTTG1 | 2838203 | GGCTTAGATGGCTCCGAGCCCGTTTGAGCGTGGTCTCGGACT |
| | | | GCTAACTGGACCAACGGCAACTGTCTGATGAGTGCCAGCCCC |
| | | | AAACCGCGCGCTGCTCGGGACCTTAGAGCCTCTG |
| 686 | PTTG1 | 2838204 | TGTTCCGCTGTTTAGCTCTTGTTTTTTGTGTGGACACTCCTAGG |
| | | | ATAGAAAGTTTGGTATGTTGCTATACCTTTGCTTC |
| 687 | PTTG1 | 2838205 | GCACCCGTGTGGTTGCTAAGGATGGGC |
| 688 | PTTG1 | 2838206 | TATACAAGGCTGCAGTCGGATACACTGGTATTGTGGACGTGG |
| | | | CCTGGAGCTGGACGAGACATTTAGTGTACTTTTTGGGCAATTG |
| | | | GAGTCGTTTGTTATTGGTCCTTTTTCATTTTTAATATCTTAATGA |
| | | | GATGATTTAAGGAAGTTACTGAATCTCTGCTATTAGGCCTATC |
| 689 | PTTG1 | 2838207 | GATCTCAAGTTTCAACACCACGTTTTGGCAAAACGTTCGATGC |
| | | | CCCACCAGCC |
| 690 | PTTG1 | 2838208 | GTAAGTGTTGGCTATAAAGACACTGTTTAAACACTTAAGCACTT |
| | | | TTGACTCTTAAAATGACTATTGGCATCATCCTACGTAGCTTTCT |
| | | | TC |
| 691 | PTTG1 | 2838209 | CTGCCTCAGATGATGCCTATCCAGAAATAGAAAAATTCTTTCC |
| | | | CTTCAATCCTCTAG |
| 692 | PTTG1 | 2838210 | ATGAGACTGTCTGAATCTGGGTTGCTTTGGACAAGTGTACTTG |
| | | | TTGATGGAATTATTTGCAAGGTATCATCTTAGGTCAGGAGGGG |
| | | | AATAGGAACAAAGATGTAGAAGACATTGTTCCTGTCTGTAAAA |
| | | | GCTTATCACCTAGAGGAGGTAAGATGTATTCATGAACATTGAA |
| | | | TAAGTCCCATTGTGGACAGTCTTTCTCACAAGGCTT |
| 693 | PTTG1 | 2838211 | CTGAAGAGCACCAGATTGCGCACCTCCCCTTGAGTGGAGTGC |
| | | | CTCTCATGATCCTTGACGAGGAGAGAGA |
| 694 | PTTG1 | 2838212 | CTGTTGCAGTCTCCTTCAAGCATTCTGTCGACCCTGGATGTTG |
| | | | AATTGCCACCTGTTTGCTGTGACATAGATAT |
| 695 | PTTG1 | 2838213 | TCTTAGTGCTTCAGAGTTTGTGTGTATTTGT |
| 696 | NADK2 | 2853389 | TTATTCTGTGCCCTGTTGACTTCATTCACTGTTAACATTTGACA |
| | | | TAGAATGATTAGTTATTAAATCAGGGTGAAGTGCTTACCTGGT |
| | | | CAGTGTAGGCTCTTCAGATAATTTTGACTTAATATTTTTGATAC |
| | | | TCCTTGTGCATTTACATTC |
| 697 | NADK2 | 2853390 | TCTTAAAGTATCTGCGTAGACATTCATAGCAAAGAATTTATGAC |
| | | | ATATCAGATAGAAATACATTAAAATGTAGTGTTTTCCCAGAGAT |
| | | | TGATCTGGCTTTTTTTTTTTGATATACATAAGATACCACTTTATA |
| | | | AAGAAGCTCCATACTATAGAACCTCCCCTAACAGGCTTAAAAT |
| | | | ACCTTCTTTTTTTTTTTTTTTTTTTTTGAGAACGGAGTCTTGCTT |
| | | | TGTCACCCAGGCTGGACTGCAGTGGCATGATCTCGGCTCTGC |
| | | | AACCTCCATCTCCCAGGTTCAAGCGATTCTCCTGCCTCAGCCT |
| | | | CCCAAGTAGCTGGGATTACAGGCAGGCACCACTATGCCTGGC |
| | | | TAATTTTTTGTATTTTTAGTAGATATGGGGATTCACCATGTTGG |
| | | | TCAGGCTGGTCTCGAACTCCTGACCTTGTGATCTGCCTGCCTC |
| | | | GGCCTCCCAGTATTGGGATTACAGGCATGAGCCACCATGCCC |
| | | | GGCCTTAAAATGCCTTCTTAAAGGAAAAATGCCAACTCCATCC |
| | | | TTAATCTCAAGGAAATCTGATTGTCCAAATAGATCTGTTAATAT |
| | | | GTAACATATTAATAGGTAACTTGCTGTGTAAAATTATAAGCCAT |
| | | | ATTTTAAAAGGTTTTAAAAATACTTATTGTGCTCCATTTGTGATA |
| | | | TAATTTCTAACATTTCTGCTCTGTGATGGGGGTTTATTTGTAAG |
| | | | AATAAGAGGCAAAGGAATGTTAGCATAGCAAAAATGTGTTTGA |
| | | | ATGAGTTAACCTTTTAATCGCAACCCTATGTGA |
| 698 | NADK2 | 2853391 | TGCCAAAAGATCCTGTCGTTGCATAATCAAACAGTTGGTATTCT |
| | | | CGTGCCGTTGTTCAAAGTCATGTGTTTCTTTCATTTGGTGCTGA |
| | | | AAATTTCTGTTCAATCATTGACAAATATTTATTGAACACCCACT |
| | | | CTGTGCCATGTAAAACTATGTCAGGTGCTGGATATGTTGATGA |
| | | | ATGAAACAGACTCTATCCTTATACAATTTGAGTCTTGTGGGCTC |
| | | | AGAAGTAAATTCTGTGAAAGCTGGACGGATAGTCGAATTGAGT |
| | | | GCTCTTA |
| 699 | NADK2 | 2853392 | CCTCCTAATTGTGGGATTGTCAGAACTGAACACATATCATTTGA |
| | | | TTAGTGCATATTTTTTATAGTACCTGAAAACCAAGATTTTGAAA |
| | | | AAATTTTCAAGACAGAGAATTTTGATAAATCCTGACATTGACCT |
| | | | AATTGACATAGGTAAATATGTTTGTATATGTGCTAATAATTTTCT |
| | | | AATTTCGGAACACGATGATGTTATGACTATTGATT |
| 700 | NADK2 | 2853393 | CTACCAGTCGTAAAGTGACATTTTTTGGTTATTGTTGAGACTGC |
| | | | TTGCCCGTGGGCTCAGAAGTGAGATTTGCATTATTCTTCTGTT |
| | | | GGATTCTGATAGAAAAAAAGACATTCACTGTATAAGAAAATGG |
| | | | ATGGACTGAACCAATTAGAATTGATACCAGTGAAATTTTTATAT |
| | | | TGCTTACAATTGGTAACCAAGAGTGCTGATA |
| 701 | NADK2 | 2853394 | TGTTCGTTCTCGTTGTTGGGATGCCTGTATGGTTGTGGATGGA |
| | | | GGAACTTCTTTTGAGTTTAATGATGGTGCAATTGCTTCGATGAT |
| | | | GATCAATAAAGAAGATGAGCTTCGAACTGTGCTTCTTG |
| 702 | NADK2 | 2853395 | TCACTGCTCTACAGTCCGGAAGAACCAAAAATACTTTTCAGTA |
| | | | TTCGAGAACCAATAGCAAATAGAGTTTTCTCAAGCAGTCGTCA |
| | | | GCGTTGTTTCTCCTCAAA |
| 703 | NADK2 | 2853396 | GAGAATTAGTGCTGTTAGAGAAAGAATACTTATGAAGAAATCT |
| | | | G |
| 704 | NADK2 | 2853397 | GAAATTTGAGTCTTCCATTGAACAGAGAATTGGTAGAGAAA |
| 705 | NADK2 | 2853398 | CATTCAATATTAACAGGGTTGCAACT |
| 706 | NADK2 | 2853399 | ATGAGATTTCAGTTGATGATGGTCCATGGGAAAAACAGAAGAG |
| | | | TTCAGGGCTCAATTTGTGTACTGGAACAGGATCAAAGGCCT |
| 707 | NADK2 | 2853400 | AATGTCTTATTCTTGGGCTGTAGCAGTGGACAATTTAAGAAGA |
| | | | AGTATACCCACTCTAAAGG |
| 708 | NADK2 | 2853401 | GCTGAGAGCTAGCTTTGCTTTATAATTTTGTACTTACTAAAAAA |
| | | | TTAAATAACTTATAAATGGAGGAAAACTTGGATCAGTTGATAGA |
| | | | TTTTGGGGGAGTTAGTGAAATTTCTTGAGGGGATTTTCAATCG |
| | | | AATGCTTTTATTTTCTGTGGCAGTAATGATCTGGTTGGTTTATC |
| | | | TCATAAATAACTGATGCTGCTGCTTTTTGTGTTCTTTGATGTCT |
| | | | CACCTTATGTTTTTACTAAGTAAGGACAGCAATGGATTGGCTTC |
| | | | TGATGC |
| 709 | NADK2 | 2853402 | CCCAACTTCTGCCAGTGAGAGCACTAAATGAAGTCTTCATTGG |
| | | | GGAGAGTCTGTCATCCAG |
| 710 | NADK2 | 2853403 | CATTTGCTGCTTAAATCCAAAATAGTTCTCTT |
| 711 | NADK2 | 2853404 | TGGAACTGGAGAACACACTTTTTTAGCTCATCACATGGCTTTT |
| | | | GGCAGAAGGCTTCAGTTCCTCACCATGTTGGTCTCTCCAAAGG |
| | | | GTTGTTCATGTTATCTCTTCCTC |
| 712 | NADK2 | 2853405 | TGGAGGCAGAGAATCAGGTTATACCTTGAAGGGACTGGCATA |
| | | | AACCCTGTACCTGTGGACCTTCACGAGCAGCAGCTAAGCTTG |
| | | | AATCAGCACAATAGAGC |
| 713 | NADK2 | 2853406 | GCTATATCTAGCTCAGTATCTTGGACTTTATGGGTTCTTGATAG |
| | | | AGTTTGACTTAATTTAAGTTACTTGGGAGATTTTGTACAAGCAC |
| | | | ATTAGGTGTTTCCGTTATAATTGAAAAGAGAATAAATATTCAAA |
| | | | TCTGTCATTGATAAGGAAGCTATAGG |
| 714 | NADK2 | 2853407 | AGGGTCATTTATGCCTGCCCGTTCGATATACACATTCCTTTCC |
| | | | AGAAGCCTTACAGAAGTTCTATCGTGGTGAGTTCA |
| 715 | NADK2 | 2853408 | GCTGCTGGCAGCGAGTAAAGTCTTGGACAGACTTAAACCAGT |
| | | | TATAGGGGTAAACACTGATCCAGA |
| 716 | NADK2 | 2853409 | GGAATTGAGGTTCGTCTAGTAAAGAGGAGAGAATATGATGAAG |
| | | | AGACTGTTCGATGGGCAGATGCTGTCATAGCTGCAGGAG |
| 717 | NADK2 | 2853410 | TACAGTGGACTTCTTGAACGACATCATATTCACACCAAAAATG |
| 718 | NADK2 | 2853411 | AAGCAAATCCAAGTGGAACAAAGGTCATCTAACCGCCTCTACA |
| | | | AGTATTAGTTTATCTTTGGTCATCAAGTAGCCATATGCAGTGTG |
| | | | TTAAAAAGTCATCAAGGCTGAGGCA |
| 719 | NADK2 | 2853412 | ATTAACACTAATGATTTTGAGCCATAAGATTATATTTGA |
| 720 | NADK2 | 2853413 | GAGGCTTTTGGCTAGGCATTAAATTTTGGCACAGGCTGTCTAA |
| | | | TCTATTATAGTATATCTTGGTAAGTTAACATCTATTAATTAATTT |
| | | | TCACAATAGCCAAATGCTTCCTCAGCTTCTCTTTTGTGAGAACA |
| | | | TAACGAAAATTACAAAGCAAGGACAAAACTATTTAAAAACTCTT |
| | | | AACCCAGTATTCGTAGGCAA |
| 721 | NADK2 | 2853414 | ATGTATCTTATTTTCCTGGGGCTTGCCGAGAGCCAG |
| 722 | NADK2 | 2853415 | CATCTCAAGCCAAAGTTCCCTAACAGTCAACGC |
| 723 | NADK2 | 2853416 | CCCATTGATTGACCAGTGACTTATTTTGTGATATCAGATTTCTG |
| | | | GTCAAACATTTTACCTCTACTGTCTCATGACCTTTCAAAGGCCA |
| | | | GTAAAACTATTATTACAATTTACTTGCATCATTAAGAGATGTAG |
| | | | CTGTTGGCAAATGTGCAATTGCTATTAACAGGGTCCTTGACAC |
| | | | AAATTAGAACTCTAGATGAAACAAAACTGACTTGGAAAGGATTT |
| | | | TGACACCAGAAACATACCTCATTGGTCAAAAAAAGGTTTTATTT |
| | | | AAAGCTCTTTTTCACCTGTCACCAGGGATGGGGAACTGAATAA |
| | | | GGAAAAAAAATTTTAATGTAGAACAAATAAGAAGTCAGCAGTTT |
| | | | CTGCCCTCCTCTCCATCATTCCAGGTCTCACAACTCGGCAACC |
| | | | CTTTTACTGG |
| 724 | NADK2 | 2853417 | GAAAAGGAGAGTGCCCGGTGCTACCATGA |
| 725 | NADK2 | 2853418 | GTACGTTATTAAGGAGAAATGTCAGGACAAGGGGCTGGTATA |
| | | | CTGGGTAGTGTGTGAA |
| 726 | NADK2 | 2853419 | GCCTTTTCCTTGCTGGAACGTGGTCGTTGGACACTACGAGCTT |
| | | | GTTTTAAAAGCACAGGTCTTTGGTGCTAAGAAGGAAA |
| 727 | NADK2 | 2853420 | ACTGCGAGGCCTAGGGCACTCCGGAAAGTCCTTCAGC |
| 728 | NADK2 | 2853421 | CGAGCAGCAGCGGTACCGTTACGCGGAGCTCTCG |
| 729 | NADK2 | 2853422 | GGCCCACGATGACTTGCTACCGAGGCTTCTTGCTGGGCAGCT |
| | | | GTTGTCGCGTGG |
| 730 | NADK2 | 2853423 | CCGGCGGTAGGGAGCTGAGGCAAGGGGCCCGAGCCCAAG |
| 731 | NADK2 | 2853424 | CCACTAGCTGGGGCCTCCATTTCTTCCCCGCCCACCTTTCTCC |
| | | | CGCGTGGGGTCTCCCGTTTCCCAATCGCCACGCTTTCCCCGC |
| | | | CTTCGTCAACGCCTGGGTACGTCCCCCTAGCCGCGTGGGCCA |
| | | | CGCACGTCCTGGCACTTAACCTCTGCCCGTCCGGCGCGAAG |
| 732 | RPL31P57 | 2858553 | AAAGAGCTCCGGAAACTTGCCCTGAAGGAGATGGGAACTCCA |
| | | | GATGCACACTTTGATACCAGGCTCAACAAAGCTGTCTGGGCC |
| | | | AAAGGAATAAGCAACGTCTCATACTGTATCCATGTTCGGTTGT |
| | | | CCAG |
| 733 | GMNN | 2898603 | TCAGTTGGTCACGTGGTTGTTCGGAGCGGGCGAGCGGAGTTA |
| | | | GCAGGGCTTTACTGCAGAGCGCGCCGGGCACTCCAGCGACC |
| | | | GTGGGGATCAG |
| 734 | GMNN | 2898604 | CTGTGGCCTTTTGCGAGGTGCTGCAGCCATAGCTACGTGCGT |
| | | | TCGCTACGAGGATTGAGCGTCTCCACCCA |
| 735 | GMNN | 2898605 | AGGCGCACAGCCTCTAGACGACTCGCTTTCCCTCCGGCCAAC |
| | | | CTCTGAAGCCGCGTCCTACTTTGACAGCTGCAGGGCCGC |
| 736 | GMNN | 2898606 | GTTGGGAGGTGAGTCGAGGGACTGCCCCATTGGCTG |
| 737 | GMNN | 2898607 | ACTGCCCGCCCCCTAGCCTGGCGCTGGGCCTCCGGGACAAG |
| | | | TTGGCTGGGTCCGGGCTTGGGGACTGCA |
| 738 | GMNN | 2898608 | TTGCCTCGACCTTCCAGCACTTTGGTGATCATGCAGGTGATCC |
| | | | GCCTGCCTCGACCTCCCAAAGTGCTGGGATTACAGATGTGAG |
| | | | CCACCACGCCCGGCCTTTCCTAAGCTTTTTTGTTTGCACATGT |
| | | | GTGTGCACGCGCCAGGACACAAGGTAAAATGTATTAATGTTAG |
| | | | AAGCCACTGCACTGAGTAAAGGCATGGCCACAAAAATTAGGG |
| | | | ACATCTATCGACGAGGCACAGGCGCAGACACGGCAGGGGCC |
| | | | AATGGGTAGTGGGCAGTGGGCAGTGGGCAGTGGAGCAGCAG |
| | | | TTCAGATGCTGAGTTTGGCCCAGTGGTCTAGTCAACCGCATTA |
| | | | CATA |
| 739 | GMNN | 2898609 | CAGGAAAGTTAAGATGCTGCTCTTTAGGATGGACCTGGGCATA |
| | | | CCCTAGTATCTGTTTATTTTGCTTTTTCTGGTGACTATTTAATCC |
| | | | AGGACAATATGTTTAGAAATTTTAAACCAGTTTTAGAAATTGGT |
| | | | TTAAAATACATTAATTTCATTTTTTCAGCTATAATTATTATGTGT |
| | | | GTATATATGTAAAATATAGATATCAAGAGTCATTAACTTTAGTC |
| | | | ACCTTAGTC |
| 740 | GMNN | 2898610 | TCTTCTGTGCTTCACCATCTACATA |
| 741 | GMNN | 2898611 | ATGAAGCAGAAACAAGAAGAAATCAAAGAGA |
| 742 | GMNN | 2898612 | TGTAGAAAGCATGGGGCTAAAAGTATTTTGACATAATTTATCCA |
| | | | AATTTAGCCTGGCTATAATTTCTGTAAGCCTTGAGTTAGTCAGA |
| | | | GGATGAGTAACAATAGAGAACATTTTTAAAAAACTAATTACGGT |
| | | | TGAATATTAAGTCTGACCCAA |
| 743 | GMNN | 2898613 | GCACTGACATTTTAGCCACCTTCTAATGAATGGGCTTGAAGCA |
| | | | GAACTGCTTCTACTATCAGGTAATGGTTGAGGGGGGATGTCTA |
| | | | TTACACATGTACTTTGTTTTGTGTAAAGTATGTTCTGGAAAGTT |
| | | | ACATTCTTTTGGTGAGTACATGTAAGTATTTGAGGGATATTCAT |
| | | | GATTTAAGGAGGCCTGAAATGAATCTTTTTGATTAGGGAAAGA |
| | | | AATATTTTGCAGTGTAAATGATTAACCATTTCTTCCAGTTTACCT |
| | | | GTTTGGTGAGTTCATACCATAAATGTTACGATGTTTGGTTTTAT |
| | | | AAAAGAGTACCTGTAAGTTTTTAGTTTCTGTGTGGAAGATTTTT |
| | | | TCAGAGAGAATACAGATAGCCTTCTTGTATTAGAATTTTGTCAT |
| | | | ATGTGGTTTGAAACTGTTCATTGGAGCTGAGGAATTTTGTTAC |
| | | | GTTTGTTTTAACTAGATATGATTAACAAAATGACCATAGCAAGA |
| | | | GCATGCATTGAAATGAGAGAAGTTACGTGTGTTTGTGTCTAGT |
| | | | TTGGGTAATATGATTCATTCTTAAGAATTCTTCAAACTTTATTAT |
| | | | AATTTTTGGAAATAACAAGTTTGTCAGTTGATTAAACCAGTGTC |
| | | | TTGTTCATAGGCGACCTTACGCAATTATATAGCA |
| 744 | GMNN | 2898614 | AATAGTTCTGTCCCAAGAAGAACTCTGAAG |
| 745 | GMNN | 2898615 | CTGCATCTGGATCTCTTGTTGGAAGAGAAA |
| 746 | GMNN | 2898616 | TTCAGCTAAGCTCTTGACCCCAGTCTAATCCAAAATAATTGTTG |
| | | | CAAATAAAATTCCTAAAATGTTACTATATGTTTTGGTAGAATTTT |
| | | | TAATTGTATAACTTTTTTAAAGATCCAGAGATGTGAAAAAGTTA |
| | | | GATATGCGTACTCTTTTT |
| 747 | GMNN | 2898617 | TGACCACTTAACATCTACAACTTCCAGCCCTGGGGTTATTGTC |
| | | | CCAGAATCTAGTGAAAATAAAAATCTTGGAGGAGTCACCCAGG |
| | | | AGTCATTTGATCTTA |
| 748 | GMNN | 2898618 | TTATGAATTCTGCCAATTACTGTAA |
| 749 | GMNN | 2898619 | TGCTGAAGGTCACAGTAACATTTGGACTCATTTTGAATTGCCTT |
| | | | GAAGACAGGAAGAAGAGAAATAGATGGTAGGATTTTTATTAGG |
| | | | CAAAATTAGGAAAGGTTGACTGGATAGAAATAAAGCAGCTCTT |
| | | | TAAAAATATTGTAGATTGAAGAGCAGGATTTGTGACACTCATAT |
| | | | CTGATTAGG |
| 750 | GMNN | 2898620 | GTGGAACACATTATCCTTGTAACCCTCTGCGATACATG |
| 751 | GMNN | 2898621 | TAAAATAACTGCGAAGAAATCCCAAACTTTATTACATTTGTTGT |
| | | | TTGAACTTTATTATATTTGTTGACAGTGGTATTA |
| 752 | GMNN | 2898622 | AGAAAAACGGAGAAAGGCGCTGTATGAAGCACTTAAGGA |
| 753 | GMNN | 2898623 | GAATCCCGTTGTGTTGAGAGTCAATTCTATGCTGCATGTCCTC |
| | | | CATGTTATATACTTGGAG |
| 754 | GMNN | 2898624 | AAAGGACAATGAAATTGCCCGCCTGAAAAAGGAGAAT |
| 755 | GMNN | 2898625 | TGAATGGTGAACCTCTGGATAATTTTGAATCACTGGATAATCA |
| | | | GGAATTTGATTCTGAAGAAGAAACTGTTGAGGATTCTCTAGTG |
| | | | GAAGACTCAGAAATTGGCACGTGTGCTGAAGGAACTGTATCTT |
| | | | CCTCTACGGATGCAAAGCCATGTA |
| 756 | GMNN | 2898626 | TGCCGAAGTTTACCTCCACTAGTTCTTTGTAGCAGAGTACATA |
| | | | ACTACATAATGCCAACTCTGGAATCAAATTTCCTTGTTTGAATC |
| | | | CTGGGACCCTATTGCATTAAAGTA |
| 757 | GMNN | 2898627 | GTGAATAGGATTTTCTCAGTTGTCAGCCATGACTTATGTTTATT |
| | | | ACTAAA |
| 758 | GMNN | 2898628 | TTGTGTATAACTTAGAATAATGAAATATAAGGAGTATGTGTAGA |
| | | | AA |
| 759 | SLC22A3 | 2934522 | GGCTGCGGCCGGCACAGCGCCAGGGCGAGTGAGGCGGGTG |
| | | | GCGCGGGGGAGGCGGCGGAGTAAAGAGAGGCCGCCGGCTG |
| | | | GGTCCGCGGGTCACTCCGAGGCGCGG |
| 760 | SLC22A3 | 2934523 | CTCCTTCGACGAGGCGCTGCAGCGGGTGGGCGAGTTCGGGC |
| | | | GCTTCCAGAGGCGCGTGTTTTTGCTGCTGTGCCTGACGGGCG |
| | | | TCACCTTCGCCTTCCTCTTCGTCGGCGTGGTCTTCCTGGGCAC |
| | | | GCAGCCCGACCACTACTGGTGCCGCGGGCCAA |
| 761 | SLC22A3 | 2934524 | CGGCCAACGACAGCGCCTCCGCCACTAGCGCTCTCAGCTGC |
| | | | GCGGACCCACTCGCCGCCTTCCCCAACCGCTCGGCTCCCCTT |
| | | | GTGCCGTGCCGCGGCGGCTGGCGCTACGCCCAGGCCCACTC |
| | | | CACCATCGTCAGCGA |
| 762 | SLC22A3 | 2934525 | GAAGCCGGCGGGAGAGGACGATGCTGGCTCCCAGGCGGACA |
| | | | AGCCGCGTGTGA |
| 763 | SLC22A3 | 2934526 | TTCCGGATTCGCTTATGGTCTCCAGGGTCAAAGGAAAGGGCG |
| | | | AACCAACGTTTGAAGGCAGCAGCAGCTTTTTTCCAGTTGCCCA |
| | | | AATGGTTACTCAAAATGCAAGGGGACA |
| 764 | SLC22A3 | 2934527 | GTGCACGAGAACGTCCCATCCAGGGACCCACGGATACTTCGT |
| | | | TCCTGCCAGGGTCTCCTTTGGGCCGACAGAGTTGTCTCTAATT |
| | | | GAGTGCAGGCAGCCCCGGAGCCCGCCGAGAGCTGAGGCTGG |
| | | | GCTGGGCTCCCGGGGACTCGGGCAGCTATTTCAGGCAGACG |
| | | | C |
| 765 | SLC22A3 | 2934528 | GAGGGAAGTGACCTGGAAGCGGAGCAGAGGTCGCAGCTGGC |
| | | | CCCTGCTGGGCCTAGTCTCGCTTCTGTCGTG |
| 766 | SLC22A3 | 2934529 | GCGTGTGCCCAGCTTAGATCCACCTGCAGCTGGCTCTGAACG |
| | | | CTGGATG |
| 767 | SLC22A3 | 2934530 | GCTCAGTGTCTTCCGCTGCTGTCTC |
| 768 | SLC22A3 | 2934531 | GTGGTGTTCTTGTCATCCTGGAAGCCCTGCCTTGGGCCATGC |
| | | | CTGAAATGCACTAA |
| 769 | SLC22A3 | 2934532 | TGACTCATGCGCATGGCATCAAGGCAGCCATGCCCAGGCCCA |
| | | | GCTCTTACCTCTGGGGAAGATAGACAGCTGACAGGTCAGGAC |
| | | | ACAGACTTTGGTGGCAACTGCCCGAGCACCCACATAGCAAGT |
| | | | TGCCGAGGCCAGGGGCATGCAGAGCCAGGAAAACCTGGGAA |
| | | | GATGCATAAACAGGCCCAGCC |
| 770 | SLC22A3 | 2934533 | CTGACACCTTGCGTGGGAGACACTAACAGGGAGAAGAGCTGA |
| | | | GCCTCCCCCAGCCTTCTGACCTACAGCACCATGTGATCATGAA |
| | | | TATGTGTTATTCTAAGCCACTAAGTTGGTGGTAATTTGTTATAT |
| | | | AGCAATAGAAAACAGATGCATTAAGTTTGTCTACAATGCCCAT |
| | | | GCCTGCAGTCATATTCTTTGGCTTCCTAGAAGGTGACCAGC |
| 771 | SLC22A3 | 2934534 | CCACTGATTTCATGACCTAACTAGAAAAACTTAGACTCGCTTTT |
| | | | GGCCATGGAGACATACATTTCCAACAAAATTTTACTTCTGCATA |
| | | | ATAATTATTTCTTAAAATTTATTACATCTTATTTTTTTATCAATTA |
| | | | TGATCTAAAGATAATTGTAATTATAACCCAAGCAGAAAAAATCC |
| | | | AATATTTAGAGACTTATTGCCACAGGAAAATTTTAAAAATTAAA |
| | | | TGTCAATTTATATATGTAACTTATTGTACATAGAAGTATGGTGA |
| | | | CAAAACCTATAAAATATTTTCTACACGAAATACATTACATTAGA |
| | | | ATAAAAGTCTGTGGAAATGAAAATAAGAGCTCAAAGAGAAAAA |
| | | | AATTGATGTCAAATTTCAGACTATTAAAGAACAGTCTGTTTATA |
| | | | GCAATTGGACACCTGATAGCATATAATATTC |
| 772 | SLC22A3 | 2934535 | TGTCTGTGTCAATGCGTGGATGCTGGACCTCACCCAAGCCAT |
| | | | CCTGAACCTCGGCTTCCTGACTGGAGCATTCACCTTAGGCTAT |
| | | | GCAGCAGACAG |
| 773 | SLC22A3 | 2934536 | CCAAGTGCGTAGTATCCCAAGTATGTAAAACTGGTTCAGCATT |
| | | | CTAAAGTCAATTAATGTCATCCATCAATCACATCGACAAACTAA |
| | | | GGAAGAAAAAATGACATGATCATATCAATAGATACAGACAAAG |
| | | | TATTTGTCAAAATCCAACATCTATATATGACAAAAGCTCTCAGT |
| | | | AAACTAGAAATATAGGGGAACTTCCTCAACTTGATAAGGAATG |
| | | | TCTATTAAAAAAACTACAGTTAACATCATACTTAATGACGATAA |
| | | | ACTGTACAGAAGCTTTCTCACTAAGATCAGAAACAAGCCAAAT |
| | | | ATGTCATCTCTAATAACTTCTTTTCAATGCCATGCTAGAAGCCC |
| | | | TCGCTAATACAATAAATAAGACAAGTAAAGAAAATAACAGGTAT |
| | | | ACTGATTGGAAAGGAAGAAATAAAAACTGTCTTTGTTCACAGA |
| | | | TGTCATGATTGTCTATGTAGAAAATCAAAAGAATTAACAACAAC |
| | | | AACAACCAAAAAAAAAAACTCCTGAAACTAATAAGTGAGTATAG |
| | | | TGAAGTTGCAGGGTACAAGGCTAATACACAAAAGTCAACTGCT |
| | | | TTCCTATGTACCAACAATGAACAAGTAGGATTTGAATTTAAACA |
| | | | CATAATGCCATTTACATTAGCACCACAAGAATACACAACACTTA |
| | | | GATATAAATCTAACAACATATGTACAAGATTTATGTGAGGAAAA |
| | | | GTGCAAAACTCTAATGAAAGAAATTAGAGATGATCTAAATAAAT |
| | | | GGAGAGATATTCAACATTCATGGATAGGAAGACTCAATATTGT |
| | | | CAAGATGTCAGTTCTTCCCAACTTGATGTATATATTCAATACAA |
| | | | TACTAATCAAAATCCTACAGAGTTATTTTGTGGATATTGACAAA |
| | | | CTAGTTCTAAAGTTTATATGTAGAGACAAAAGACCCAGAATAG |
| | | | CCAACGCAGTACTGAAGGAGAAGAACAAAGCCAGAGGACTGG |
| | | | CACTACTTAACGT |
| 774 | SLC22A3 | 2934537 | ATCCTGCCTTGGTGTTGGCGTCACTGGGGTTGTGGTGGCCTT |
| | | | TGCACCAAACTTCCCTGTGTTTGTGATCTTCCGCTTCCTGCAA |
| | | | GGTG |
| 775 | SLC22A3 | 2934538 | TGACAGAAATAGTAGGTTCGAAACAAAGGAGGATTGTGGGAAT |
| | | | CGTGATTCAAATGTTCTTTACCCTTGGAATCATAATTCTCCCTG |
| | | | GAATTGCCTACTTCATCCCCAACTGGCAAGGAATCCAGTTAGC |
| | | | CATCACGCTGC |
| 776 | SLC22A3 | 2934539 | CCCGTTGGCTGATTACTCGGAAGAAAGGAGATAAAGCATTACA |
| | | | GATCCTGAGACGCATTGCTAAGTGCAATGGGAAATACCTCTCA |
| | | | TCAAATTACTC |
| 777 | SLC22A3 | 2934540 | GGAAAAATCATAGGACATATTAAAGAAGAAATGATTATGAAGC |
| | | | TCTATTAG |
| 778 | SLC22A3 | 2934541 | CGGAGAAGGTTAGAATGGATTTGAAAGAATGTGGTTGGATTCA |
| | | | AAGAAGCCCTAGGAGACCCAACAAGTCAGCATTTTTCTCTTGT |
| | | | GAAAAGAACCACCTGCCAACCCCAGCCTGTTCCATTGCTGAC |
| | | | ATCAGAGG |
| 779 | SLC22A3 | 2934542 | CATTTGCCAAGGTTTCTGGCTGGCCTCTGGCTTTGTTGAAGAG |
| | | | ATAGCTAGCACTAGCAGGGAGAAA |
| 780 | SLC22A3 | 2934543 | AGGCTCTCTGAACATACAAACAGTATAACTGTTGTTCACTAAAT |
| | | | GGAAAAATCCCAAAATCAAAAACCAATGCAAAACAGTGAAGTG |
| | | | GCTTGAGCTCCTAGGAGGTTAGGTAGAAATTAAAGAGAATCAG |
| | | | TGGATGGGTAGAATTTTAAGCAGTAGGTAGTTACCCAATGTAG |
| | | | AACGAGGATTAGCTTAGACACCTAGTCTGG |
| 781 | SLC22A3 | 2934544 | CTGCCCATTCCTCCCGTTTTTGTATGGGATATACTCATAGAGA |
| | | | ATA |
| 782 | SLC22A3 | 2934545 | GATGAATGGTGCCAATTCTACCAGCAAAGCCTTCATCTT |
| 783 | SLC22A3 | 2934546 | TGTCATTCAACACCGAAAGATATTGAGGGGAGGATGTTCTCCT |
| | | | ACACCTTTAATTGAAATGGAAATTCAATTTAAAGGTGCTTTAAA |
| | | | GAATGAGATTGCAGCCTTGGAGCAGGCTAGGCAGACTTGTGG |
| | | | GATGCCTCATCAGA |
| 784 | SLC22A3 | 2934547 | ACCTGGTTCTTCATCTGGTCCTGAGTCCTTGCCCATTCTACTG |
| | | | TGGCTCTGGCCCTGCTTCATTCCTGCCTGATTCATCCTCAGAA |
| | | | GGCAGGTTTCTGTCCTGTCCCTACACATC |
| 785 | SLC22A3 | 2934548 | AATTACTGTGCTTCTCGACTGTGGATAAATGAGAAAATACTCCT |
| | | | CTCTGTGAACGCGCTCCTTCGTGGAGACAGTAATGAGTACAA |
| | | | CTTCCAGAGCTCTGCGCAGCCAGCAACCCTGGCAGGAGTCCC |
| | | | TGTGTTATTCATAACCCAGAGCTGTGTTGCCATGGCAGTACTG |
| | | | CTTGCTAGACCTTGGACCCA |
| 786 | SLC22A3 | 2934549 | GTGTGCTACTGGCTTATGGCTGATACGTAAGAGAATCTCATCT |
| | | | ATCTCTAAATGTTCTGCCTTAAGCCGCACAAAGGA |
| 787 | SLC22A3 | 2934550 | TGTGCAGAAAATATTCTGCAAATCAAGAACCAGAAAA |
| 788 | SLC22A3 | 2934551 | AAATGGAGGAAATTCCGAGATGACAGTGGTTTTGGTTCT |
| 789 | SLC22A3 | 2934552 | GCTCTTTGAGAATGTAGTCGGGACTTGCCCCAGTCACCCTTGC |
| | | | CCTGAGAACTCAGTGACTGGGGCTAATGTCACCCTGGCTGTC |
| | | | C |
| 790 | SLC22A3 | 2934553 | GGAGACACCTACCAGGAATCTAGTGGGACAAGGTTTCAGGGA |
| | | | TCCTGGAATCCTGCCCACACCCAACAGCTGGAACAGTTCCCT |
| | | | CAGCTGGCGAGTGGACAGGTGGTCT |
| 791 | SLC22A3 | 2934554 | GATGTTAAAGACCATGTTCCCATAGAAATAATTCCCAAAGCATT |
| | | | CAGAAGACTGAGAAGAAGTGATGATAAGAATTGTTCTGGGCA |
| | | | GGAGTGT |
| 792 | SLC22A3 | 2934555 | TTTCAAAAATTGCCGAAGTACTACAG |
| 793 | SLC22A3 | 2934556 | ACTAACCTCTGCAGTTTAACCTTGAGCGATACCTTTTCCCATGA |
| | | | ATAG |
| 794 | SLC22A3 | 2934557 | AGAGTGTCGATACTAGGCAACAAGCCTCTGAACAGATAGTGTT |
| | | | ACCCGGAACATCACCCTTTTCTCCCTTTGCTTCAAATCAAAACC |
| | | | AGCATCCCCCATTTAGACAGCATAAAAGGTATG |
| 795 | SLC22A3 | 2934558 | CTTCACTGAGACACAAGGAAACTTTTGGGGATCATGGAAAGG |
| | | | GTCCGTACCACGGTTGTGGTGGTGGTTATAAGACTATATATTT |
| | | | GTCAAAAGTCTTCAAAGTGTGCACTTAGAATTGCTGAAGTTTAT |
| | | | TGTACATAAATTACATGTAAATATCATAAAGTGCATGTAAATGG |
| | | | T |
| 796 | SLC22A3 | 2934559 | CAGATGAGGAAGTTAGTAATCCATCCTTTTTAGATCTGGTGAG |
| | | | AACTCCCCAAATGAGGAAATGCACACTTATTCTTATG |
| 797 | SLC22A3 | 2934560 | CGCAGTGGTGTATCAAGGACTTGTCATGCGCCTGGGAATTATA |
| | | | GGGGGCAACCTCTATATAGACTTTTTCATCTCGGGCGTGGTG |
| | | | GAACTGCCAGGAGCTCTCTTGATCTTACTAACCATTGAGCGCC |
| | | | TTGGACGACGCCTCCCCTTTGCGGCAAGCAATATAGTGGCAG |
| | | | GGGTGGCATGCCTTGTCACTGCGTTCTTACCA |
| 798 | SLC22A3 | 2934561 | TATTTGGTAAATTCAGAATTGTACCCAACAACATTACG |
| 799 | SLC22A3 | 2934562 | GTTTCGCTCTGTTCAGGTCTGTGTGATTTTGGGGGAATCATAG |
| | | | CCCCATTTCTGCTCTTTCGGCTAGCAGCCGTGTGGCTAGAACT |
| | | | ACCTCTGATCATCTTT |
| 800 | SLC22A3 | 2934563 | TTCTTAAGAGCCTTCATCTACATTCTTTGTACTAAAAGAGACCT |
| | | | ATAATAATTGTTAGGTTCAATAATGATAATGATAGTCATTTATCT |
| | | | TATTATAATAACTATTTCATTGATAATTATGATATTAATTTCATCT |
| | | | TATTATAATAACTATTTCAGTTTTGAGAGCCAATTCAGTTATAAT |
| | | | GAATGGTTTTAATTTACTTTATATTAAAGGGTGCTGATAAATAAT |
| | | | GTTCAATTAGCATTCTTTGGGTTCTGAGTTAAATGCTGTGA |
| 801 | SLC22A3 | 2934564 | CAGAAAGTGCTACTGTCCAGCAAAGACAGAGTAGTCCAGGAG |
| | | | ACAAGACAC |
| 802 | SLC22A3 | 2934565 | ATGACCTTCAGGACTGCAGCCCACAGCCCAGTGGCAGGCAG |
| | | | GCGGGGCCTGAGACTGCGAGGGGAGACAGCCGAATTTCTAA |
| | | | AAACTCAGCGACAACAGAATGTGATAACTGCT |
| 803 | SLC22A3 | 2934566 | TTCAAAGCAAGAGGATGCCGCATCCTCAAGCACCTGGTGCTA |
| | | | GAGGATGGAGTGCAGTTGTGAGCTGGGCCTGAAGAGAGGTG |
| | | | GTGCCAGGGCAGGGCAGGGACTGGATCCGGAAGGGCCTCAA |
| | | | GGACATGCCAAGGCTTTGCTCTTTATACACACAGCAGTGGAAA |
| | | | GTGACTGGACAGTTTCACCCTGAGGTGGACAGAGCTGGCCTT |
| | | | GCATTGTAGAAACACAGATATGCAAGTGGGTTGGAAGGACCC |
| | | | CCCAGCATCGTCCCTCTGATGGTAGATATGCAA |
| 804 | SLC22A3 | 2934567 | TTTGTAAGCCAGTCATCAAGCACAGATATCATCAAAAAGTAAA |
| | | | GAATATGAAATATATGAGAAATAGAGGCAATAAATGCCCAACA |
| | | | CTCATCAGTCCCTAATTCAGCTACTACACCTTCAGTATTACCTG |
| | | | TGCTCCTGAGATTGTGTCTGCTGCATCTTTATGGTGGAAGCCC |
| | | | CATTGATGGGGCTCCTGCATCACTTCCCAGTGGCCCAGGCAG |
| | | | GGATGTTGTGTCAGTAGCCTGAAGGGCCCACAGTGGGAGCAT |
| | | | TTAAACCATGCACATTGGCAGATGCTGCCAATCAGGGCTTGAT |
| | | | TGCCCAAAGAGGGTTGTTAGGCATTTACCAGC |
| 805 | SLC22A3 | 2934568 | ACTGGAGGAAGGGTTGATCCCTACAGTGAGGAGCCCAAAGAG |
| | | | ACAGGCCTAGGAGAAGGCTGGTCCCGGAGTAGACACCAGGA |
| | | | CAAGCTTTCCACTGTAAG |
| 806 | SLC22A3 | 2934569 | AGGGGCAGGTAAGTGAGAGTGTCAGTGAGCGGGCGCAGAGG |
| | | | GGACTCCC |
| 807 | SLC22A3 | 2934570 | TGGACCCTAAGAAGGAACTCAGTCA |
| 808 | SLC22A3 | 2934571 | TATACAGGGGCCGTGGTGCTACTCAGGGTTTGAGGAAGGGAG |
| | | | AGAACCTTTGAAGCTGTGGTAAGGGAGAGCTGGGGCATTGAT |
| | | | CTGGGATGCAGAGGTTGCTGTGGTTGAGAGCTACTCCAGTGA |
| | | | GCAACATGATGGCTTCAGAGTGAGCAGGCCCCATGGGAGAG |
| | | | GGCCCAGCTGTGTCTTCCTGGAGCGGTAACACCTT |
| 809 | SLC22A3 | 2934572 | GTATCCTGGCATCCATCTGTGGTGGCCTTGTGATGCTTTTGCC |
| | | | TGAAACCAAGGGTATTGCCTTGCCAGAGACAGTG |
| 810 | SLC22A3 | 2934573 | GTACTGTACAAAATTCAATGCACCCTAA |
| 811 | SLC22A3 | 2934574 | CCCTCCAGAGCTAGATAAGAGTATGCATTGTTTTTTTTAATGTG |
| | | | GTTGTGAAGAGAGAAGCATTTTCACATAAGGTGCTAAGACTCA |
| | | | GAAGTGATCTAAAGGCAGGAACTGCTGATGTGGGAAAGTGGA |
| | | | AATTGCTGGGACATACAGCAGCAGGGGATTAACAGTGTGGCT |
| | | | TACTCTACAGAGTGAGGATGCGTCAGGTCTGTCTAGATGGAAT |
| | | | GGCATAGGCAGGTTTTCAAGACTGACTACAAAGTGAAATGTCA |
| | | | CTGAACAACATGTTATAGTATTTATAAAAAACTAAAACCAAAGG |
| | | | TGTTTTCTCTCTGCAGCTGGATAGGAAGACAGATGACACACAG |
| | | | ATGATAGATAATAGGTAGATGATAGATAATAGGTAGATGGATG |
| | | | ATAGATAGATATAATAGATGATAATCATAGATAGATAAGTGATA |
| | | | GTAGATAAATGATAAATAATAGATGATAGATGATAGATAGATAC |
| | | | AGATAGATAAATAGACAGGTAGATGATAGGTAATGTCTGGATA |
| | | | GATAGGTGGATAGATAAATAGATAATAGATGATAGATAATAAAC |
| | | | ATTAGTAGGAAGATAGAGAGATTGAGTTTTGGAGGGGGGTGT |
| | | | TTAAATAGGGTATAAGTAAAACTAATACCCAGCCAATATATTAA |
| | | | CATGAGGAGTAATGTCAAGAAAAATTCACATTACACAAATTCTT |
| | | | TCTAATTGTTTGAAATTTTTTCATTAAAACATAGAGATATGAATA |
| | | | TGAGAATGTATAGTACAAGATGTAAAATATTAATATGTGCCCTC |
| | | | TGTGGACACAAATGGGCTGGGAAGAGGGGTAGGGAAGGGAG |
| | | | GACCATCACTTTCTTGCCAGAGACTTCCATACTGTTTGATTTTC |
| | | | TTTAAAAATTAGAACACGTAGTCTTGTGTTGCTTGTGTAGTTTT |
| | | | AAAAAATGATGTAACAGCTAATTTAACAACTAAAAAGCAATCTT |
| | | | AATAATGACTTAGGAATTAAGAACATGGAGCTCTAAATATTTTT |
| | | | AATATATAAAAAATCCTGAGGAACAGCTTTCTTCCCTTTGATTC |
| | | | TATTCCACTGACTGCCTTCTGTTTACACAATGAGAGTGATGCTT |
| | | | TCATTCTTTATCCCCAAACCAATCAGGATCAGATTTGCAAACTC |
| | | | ATCAGGAAAAAATGGAAGAAAAGGGAGTCCTCTGAAATCAAGA |
| | | | CTTTTCTACTGCTTCAGTAACATTAAAAATAAACAGCTAGGAGA |
| | | | GGTTTTTTTGTTTTTGTTTTTGTTTGTTTTTGGCTTGGGGAGTG |
| | | | TGGGTGGAAGGGGGTTGTCTAAATGGTGTGCAAGGAAAATCA |
| | | | ATACCCAACTAACATATAAACATGAAGGATTATACCAGCAAAAA |
| | | | TTTAAGGTACCCAGATTCTTTCTAATTTTTTTCTGTTTATAATTT |
| | | | TTCATAATGAAAAGTTGGGTACATTAATTAATTATACCTAGTCT |
| | | | CTATACATGAAAAAAAATATAGTAGAAGTATGGTTTACAGTGCT |
| | | | ACAATTTAAGCACATTAATTGTGATCCATGGTTATTTACTCTAC |
| | | | AAAAATTACTTAGTGCTAAATTACTAAAACTTGCTAGCATTTCC |
| | | | CTTTTAAAAATCACACTGGATTATTTTATCGTTTCTGCTGGTTTT |
| | | | TGTTCATGTTAACAGCTCATTTCCAAATATATGTTAATTCAGTA |
| | | | GAAGTTCATAAAGAACTTAAATGCTATAATGCTAACAAACCCCT |
| | | | GTATCAGAGGAACCAGCCCCCAATATTTCAGCATAGGTTCTAT |
| | | | TTTCCATAAGTGTTGGCCAGCTGAGAAATAAAAAGAGTACAAA |
| | | | GAGAGGAATTTTACAGCTGGGCCGCTGGGGGTGACATCACAT |
| | | | ATCGGTAGGACTGTGATGCCCACCTGAGCCTTAAAGCCAGCA |
| | | | AGTTTTTATTAAGGGTTTCAAAAGGGGAGGGGGTGTAAGAACA |
| | | | GGGAGTAGGTACAAAGATCACATGCTTCAAAGGGCAAAAAGG |
| | | | AGAACAAAGATCACAAGGCAAAGGGCAAAAACAAACATCACAA |
| | | | GACAAAGAGCAAAAGCAGAATGACTGAAAAGGGTCTATGTTCA |
| | | | GCGGTGCATGTATTGTCTTGATAAACATCTTAAACAACAGAAA |
| | | | ACAGGGTTCTAGAGCAGAGAACTGGTCTGACCTCAAATTTACC |
| | | | AGGGCGGGGTTTCCCAATCCTAGTAAGCCTGAGGGTACTGCA |
| | | | GGAGGCCAGGGTGTATTTCAGTCCTTATCTCAACCGCATAAGG |
| | | | CAGACTCTCCCAGTGCGACTGTTTATAGACCTCCCCCTAGGAA |
| | | | CGCATTCCTTTCCCAGGGTCTTAATTATTAATATTCCTTGCTAG |
| | | | GAAAAGACTTCAGCAATATCTTCCCTACTTGCACATCCATTTAT |
| | | | AGGCTCTCTGCAAGAAGAAAAATATGGCTGTATTCTGCCCGAT |
| | | | CCCACAAGCAGTCAGACCTTA |
| 812 | SLC22A3 | 2934575 | CCACATTCCTGTAAATGTGGCAGGAATAAGAAAACCCCAGTTT |
| | | | CCCGCTCTCACCTTTGA |
| 813 | SLC22A3 | 2934576 | TGTGCCTTGCAGAGATGCACGTGTG |
| 814 | SLC22A3 | 2934577 | ATCTGGTCAAGGGACTAAGCTCCTAGCTGACCATTCATTCTGA |
| | | | AGATTGCATGGAGGATGAACATCTGGGAATCCTGTTAATGAGA |
| | | | AGGCTGAATCACAGGCACCTGGGCCAAAGGGTGTGAGCATTC |
| | | | ATGTTCTCTGCTCACCTTGGTTTCCGCACACCTTCGCAATGTG |
| | | | AACAGGTCAGGAGTCCCTCCCGTCCACCTCCTCTGTAACAGC |
| | | | TGGGGTTCCAGGCATGGTTTAGGCCCTGTTCCAGCAATAAGA |
| | | | ACCAATCTGCTGTACAATCTGAGGACTTGGCTCTGTTATTTACA |
| | | | AAATGATGCTGTGGTTCTGAGATTATTTGGGACATTTTTGGCTC |
| | | | TCCTTTAGTGGACACCTAGAGCCACAGATTCCCTTCTTTACTAA |
| | | | ACAAATCCCATGGATTCTGATTTCTGGGTCTTAGGATTTTAAAA |
| | | | GTGAAGGGATATTTTTCTTATATTTGTGAGTTCAGTTCCGATGG |
| | | | TGCCCGTGGTCAAAAGCGAAAA |
| 815 | SLC22A3 | 2934580 | ATTGCTGACTCATGGCTGTATCTGGCCTAATATTGTTCTGGTTA |
| | | | ATCCATCTCTGACTCATGGCCATATCTGGCCTAATATTGTTCTG |
| | | | GT |
| 816 | SLC22A3 | 2934582 | GTGGGTTCTTGTGACTGTACCATTCA |
| 817 | SLC22A3 | 2934584 | GCAAACAGCAATTAATTAGCTAATAGAACAACAAAAGGCCCCA |
| | | | TATCCTGTAGCCAATTGAAGATCTGAGTTTAATCAGACCAGTG |
| | | | CTTCAAAATGGGTAGAGCCTTG |
| 818 | SLC22A3 | 2934585 | CTGTCCTTTGCATGTGAGTTTCTGCTGGATCCTTTCAT |
| 819 | SLC22A3 | 2934586 | TGCTGGCTACAATTTGGAACTGTGCAGTTTAAATATTTATTTAT |
| | | | TTTGTTTTGTTTTTACTCTTTCTAATTTGGATATTAGGTTTTGCT |
| | | | TCATCTGTGTTTTTTTTCTCTTACTCAGTCAATAACCATATCTCC |
| | | | AAACTAAATTAACGTTACTAAAGTGGGGAATTTCCCCTTCCTAT |
| | | | ATTCTCATAAGTGATTGAGCATCTGTCCTCATATAGGACTTGCT |
| | | | GCCTTGGAGGGGAGGGGCCAGACCTGGGAAAAAGAGGAGCC |
| | | | ATGAATAACTCTGCTTCCTACATTTGGCTTCTTCTCTTCCTCCA |
| | | | TATCCATGATTTATATATGTGAAGGAAGAACAAGAAATAACTTA |
| | | | ATAGGCCATTTGTCAATGAGAGTACAGTGTAGGAAGGGTGGA |
| | | | AAGTGAATATAAAATCTAGATTGGGGCTTCTGGTTTCCTGTTCA |
| | | | GCCTATAAGGAGCTTAGAATTTGCCACTCAGTCTTGACAACAA |
| | | | GTAAAATGCTGAACAAACTGAAAAATCAATAATTCTTCTCAGAT |
| | | | CCATAAGAGAAGTGAGATTACAGGGCAAACTACTACCTTCAGC |
| | | | ATCACCCCGCACCCCCAACCCCACTAAATAGAAAGACAGGAG |
| | | | AATACAGAGAATCATAACACAGGCGCAGAAACCTCCTTGAGAG |
| | | | AGCCAGGGTAGATAAACATGAACTGTAATTGATGAATTCCTGG |
| | | | AGGATCACTGTGGATGACCTGAAGGATTAAAAACTCTAGAGG |
| | | | GACTCACTCAAAGGAGGGCCCAAGCTTTTGTGATTTTTTTTTTT |
| | | | TTTTTTTTTTTTTTTGCCACCTGAAGCTCTACAAGGTTCCAAAG |
| | | | GTGAATATTAAGGAAAATCCCTCATGCTCTGGCAGCCAGAGG |
| | | | GGAAAAGGAACAATTTTGAAATATGCCAGAATATCGTTCTTAAC |
| | | | AATGTCTGCCCTCAGGAGAAGATGTTTAACCAGAGCCTAATCT |
| | | | TCTGGGGTTTTCTGAGAGCCTCATTGATCTGGGGGAAGGGAA |
| | | | ATACCAACTCCAGCCCCTTCTAGCCTTCCAAGTGGAGAAAGAG |
| | | | AAACACCAAATTCTAGCCTCCTCTAGCTTTCAACTTGGAAGAA |
| | | | GGGAAATACCCAGCTCCAGCCCCCTCTAGCCTTTCTCCCCTA |
| | | | GTTCAGAGGAGAGGGATAGAGAAGCATTTGTGAAGTTCACCG |
| | | | TTTAGAGACATAGGTTC |
| 820 | SLC22A3 | 2934587 | ATTAATGGCAGACACCACAGATCCAGGAAACTCAAAGGAAATC |
| | | | AAGCAAGATAAACATAAAAAAGTATACCTAGTTATATCGTAGTC |
| | | | AAACTACAGAAAGCCAAAGATAAAGGAAAAATTCTGAAAGAAG |
| | | | AGTGGGGGGATAATGTCTTACTATAGTAAAAGAGCAATGATAA |
| | | | AAATTACACCCTACTTCTTTTCAGAAACCAGGTAAGCAAGAAG |
| | | | AAAGTGGAATACTTAAAGTGTCAAGAAAAAAAATCCAATCTAGA |
| | | | ATTCTATACTGTGCAAAGTTATCATTTAAAAGTGAAGGAGAAAT |
| | | | AAAGACTTTGTTAGACAAAAATTGAGGGAATTTGATGCCTTGTA |
| | | | ATAAATGTTAAAAGAAATTATTTAGAGAGAATGAAAATGATCTA |
| | | | GGTTAGAAATCCAGATCTACATAAA |
| 821 | SLC22A3 | 2934588 | AGGTACTCATACTACTCATGAAGTGATACAGTGTTATTT |
| 822 | SCIN | 2990412 | CATATGGAGACCTTTTCCCTACAAAACACTTTTTTGAGAATTAG |
| | | | CAAAGCATGGTGG |
| 823 | SCIN | 2990413 | TGGATGACTATTTGGGTGGCAAGCCAGTGCAGAATAGAGAAC |
| | | | TTCAAGGATATGAGTCTAATGACTTTGTTAGCTATTTCAAAGGC |
| | | | GGTCTG |
| 824 | SCIN | 2990414 | CCCTCCACACGTGTTCAGTTAAAGTGTGAGGAATACCCTCCCC |
| | | | AGACAAACATCACAGATTTCCGAAATCAAACACGCTCCAGCAA |
| | | | GTGTTCTGCACACCCCACTG |
| 825 | SCIN | 2990415 | GGCGTGGCATCTGGATTAAATCATGTTCTTACGAACGACCTGA |
| | | | CAGCCAAGAGGCTCCTACATGTGAAGGGTCGTAGAGTGGTGA |
| | | | GAGCCACAGAAGTTCCCCTTAGCTGGGACAGTTTCAACAAGG |
| | | | GTGACTGCTTCATCATTGACC |
| 826 | SCIN | 2990416 | AAGCTTTTTCATTTATTCGTCCAGCAGCATCT |
| 827 | SCIN | 2990417 | GTTAGTATAGAAACAGCACTCCTCTTCTAAAAAGATAC |
| 828 | SCIN | 2990418 | GGTGTGGTTCCTCGTGCAACAAATATGAACGTCTGAAGGCAAA |
| | | | CCAGGTAGCTACTGGCATTCGGTACAATGAAAGGAAAGGAAG |
| | | | GTCTGAACTAATTGTCGTGGA |
| 829 | SCIN | 2990419 | TGGCTTCCATATGGAATGCCGAGTATGTCAGCCTG |
| 830 | SCIN | 2990420 | TCTTAGGGGAAAAGCCAGAGCTTCCAGATGGAGGTGATGATG |
| | | | ATGACATTATAGCAGACATAAGTAACAGGAAA |
| 831 | SCIN | 2990421 | GGGCTGCCAAACAAATTTTCGTATGGAAA |
| 832 | SCIN | 2990422 | GTAAAGATGCTAATCCCCAAGAGAGGAAGGCTGCAATGAAGA |
| | | | CAGCTGAAGAATTTCTACAGCAAATGAATTATTCCAAGA |
| 833 | SCIN | 2990423 | CCAGAAGGAGGTGAAACACCAATCTTCAAACAG |
| 834 | SCIN | 2990424 | GCTTCGGGAAAGTTTATGTCACAGAGAAAGTGGCTCAAATAAA |
| | | | ACAAATTCCCTTTGATGCCTCAAAATTACACAGTTCTCCGCAG |
| | | | ATGGCAGCCCAGCACAATATGGTGGATGATGGTTC |
| 835 | SCIN | 2990425 | CGTGTAGAAAACAATGGTAGGATCCAAGTTGACCAAAACTCAT |
| | | | ATGGTGAATTCTATGGTGGTGACTGCTACATCATACTCTACAC |
| | | | CTATCCCAGAGG |
| 836 | SCIN | 2990426 | TGCGTTCCTGACTGTTCAGTTGGATCGGTCCCTTGGAGGACA |
| 837 | SCIN | 2990427 | GGCAAAGAGCCTGTTCACCTACTGAGTTTGTTCAAAGACAAAC |
| | | | CGCTCATTATTTACAAGAATGGAACATCAAAGAAAGGAGGTCA |
| | | | GGCACCTGCTCCCCCTACACGCCTCTTTCAAGTCCGGAGAAA |
| | | | CCTGGCATCTATCACCAGA |
| 838 | SCIN | 2990428 | TCCTGAAACTGCCACAAAATAGTGGCTACATCTGGGTAGGAAA |
| | | | AGGTGCTAGCCAGGAGGAGGAGAAAGGAGCAGAGTATGTAG |
| | | | CAAGTGTCCTAAAGTGCAAAACCTTAAGGATCCAAGA |
| 839 | SCIN | 2990429 | AAAAAGACTACCAGACCTCACCACTACTGGAAACCCAGGCTG |
| | | | AAGACCATCCACCTCGGCTTTACGGCTGCTCTAA |
| 840 | SCIN | 2990430 | AAGAGATTCCAGGAGAGTTCACCCAGGATGATTTAGCTGAAGA |
| | | | TGAT |
| 841 | SCIN | 2990431 | ATTTATTTGGATTGGCAAAGATGCTAATGAAGTTGAGAAA |
| 842 | SCIN | 2990432 | GTAAGCTCAATCGATGGACCATTATAGCAGTAACCGGGCACC |
| | | | ATTATGACCGAGTGTCTGGCTTGCTCTTTGCCACCATGTCTTA |
| | | | CAAAAATAC |
| 843 | SCIN | 2990433 | GAGGACACCAATTGTCATCATAAAACAGGGCCATGAGCC |
| 844 | SCIN | 2990434 | ACAAGGCAGTTATCTCATTGCTGTTTTGGGAGAGGAACGGGA |
| | | | AAAGCTTTTTGCTTATTTGTCTTTTGAAAATTAAGGCTGGGCGC |
| | | | GGTGGCTCACACCTGTAATCCCAGCACTTTGAGAGGATGAGG |
| | | | TAGGCGGATCACTGGGGTCAGGATTTCGAGACCAGCCTGGCC |
| | | | AACATGGCGAAACCTCGCCTCTACTAAAAATACAAAAAAATTA |
| | | | GCTGCGCGTGGTGGTGCACGCCTGTAGTCCCTGCTACTTGGA |
| | | | AGGCTGAGACAGGAAAATTGCTTGAACCCAGGAGGCTGAGGT |
| | | | TGCAGTGAGCCAGGATTGCGCCACCACACTCCAGCCTGGGCA |
| | | | ACAGAGACTCTGTCTCAAAAAAAAAAAAAAAAAAAATTAACCTC |
| | | | AACCAAACGCCTATTTTTTAATGCTTAGTTTTGGCTTGAAATTC |
| | | | TTCTTCACCTGGAGTTTTCTTACGTTAATACATTAAAATAACCT |
| | | | GAAGGAAACTTTCGTTATGGGCCAATATTAGCTCTTATGGAAA |
| | | | CTGATTTATATCTTTTTTATGACCTTTCAAAAGTAAAATACTATG |
| | | | CATAATCTAGAAAGATTTGTCAGATAGGAAATTTTATAATGCAT |
| | | | TAGCCATTAGTCAGAGTTGTTTTTTAACATGCCAGAGAAAAAGT |
| | | | TGTAATGCCTTGGAAGTTATTCTCTTTTCTATAGATTGTGTTCA |
| | | | AAAGATGTGTATACTTGCAATAAGGTTTATGTTAAGGTGGCTTT |
| | | | AACAATTGGTTGCTA |
| 845 | SCIN | 2990435 | GAATTGTATTGTTATCCACTTAGATACATGTACATGTACAGTAC |
| | | | ATGTTTAATA |
| 846 | SCIN | 2990449 | AAACACTATAAAGTGGCGGCGAATAAGGTTCCTCCTGCTGCTC |
| | | | TCGGTTTAGTCCAAGATCAGCGATATCACGCGTCCCCCGGAG |
| | | | CATCGCGTGCAGGA |
| 847 | SCIN | 2990450 | CCGACGCACCAAGGCCGGCGAGGGGAGGGCGTAG |
| 848 | SCIN | 2990451 | TTATTTGTTGCTTTCGGGCACTGGCTTATTTTCTCTATGATTGC |
| | | | GGGAATTATTGTTCTGGGCTTCTTTAAAACAG |
| 849 | SCIN | 2990452 | GATTCTACCCGCACCATGCTGCTTGTGGGTCTGGTAGACAAAA |
| | | | ACTCCGCTTCATTCGGAAGCTGGCGTCCTCAG |
| 850 | SCIN | 2990453 | CTACATCTACATCTTTATGGTATTCTCA |
| 851 | SCIN | 2990454 | TTAGGGTTCGGATCCCAAATCGGCAGAAGAATGACA |
| 852 | SCIN | 2990456 | GCGGGAGCTATACCACGAAGAGTTCGCCCGGGCGGGCAAGC |
| | | | AGGCGGGGCTGCAGGTCTGGAGGATTGAGAAGCTGGAGCTG |
| | | | GTGCCCGTGCCCCAGAGCGCTCACGGCGACTTCTACGTCGG |
| | | | GGATGCCTACCTGGTGCTGCACACGGCCAAGACGAGCCGAG |
| | | | GCTTCACCTACC |
| 853 | SCIN | 2990458 | GTTCTACTGTTGTATAGTGCTATGTGGTGAATACAGTTAACAAT |
| | | | AATTTATTGTATATTTTTTCAAAGCTAGAAAAGGATTTCGAGTG |
| | | | TTCCCAGTACAAATAAGTGATAACTATTTGAGGTGATTGATGTG |
| | | | CTAATTACTCTGATTTGATCATTACACACTTTATACTTGTATCAA |
| | | | AATATCACTCTGTAGCCAATAAATATGTACA |
| 854 | SCIN | 2990459 | TTTGTTAGCCATTAAAGCAGTTTGAACTTATCCTACCCATCCTC |
| | | | TTTTCCATCCCTCAGGAGTAGGGGACATATATGTAATATTGTA |
| | | | GCCTGGGGGTGGGGAGTGAGGATGAGGATGGATGTGTGAGT |
| | | | CTGGTTTGTACTCATCAGTCCTCACTAATCTATAACCTTCGTTG |
| | | | AGGTGTAGTCATTCCATTAATTCTTGAGCTTTCGGCTTTGGCCT |
| | | | CTGTTC |
| 855 | SCIN | 2990460 | AGCCACTACTGCATTCTTCTCAGGAACTCTGCTTTGTTTTTCCC |
| | | | AGACTACCCTAGAATTGTGGGACACGGTATCCTCATCGTACCA |
| | | | GTGCCCCTTGGCCCAGTGGCTTGGATGCTACCCTCAGTCATTT |
| | | | CTGCTCTAATGCTTAGGCTCATGGAGGGGTGTAGGACAAATC |
| | | | AATTGGAAGGGAAGTGTGCTGGGCTCTTCTCAAAGATTGATTG |
| | | | CTTTGGGTTAGATTTCCTACTTTTTTCAGTCTTCTTTTTTACTTT |
| | | | TTGAACCAGACAAACTAGTCTTACACCACCTCACATTCTTGCCT |
| | | | ACTCTGTGTTTCCTGCAAGATACACTCCAGCCCCTAAGACCCA |
| | | | CACCGTACTGCTTAAGATG |
| 856 | SCIN | 2990462 | AGCTGCTGTCCCTTAGTATTGAATATCTCTATTTTCTTTTAATCA |
| | | | TAGAATTCACTGATATTTTAGCAGATAATGTGGCCGTCCAGGC |
| | | | AGGCATGAGATTTCTCAGCCTTACTTCAACTTGATTATGACCAT |
| | | | GTGACCCAATTCTGACATTTGCCTAAAGGAAAATTTACCTAAAA |
| | | | AGGCGTTTTCTTGCTATGGCA |
| 857 | SCIN | 2990463 | TTCTGAATGCATCACGGCAAAGATGCATGTACTCATGAAGCAT |
| | | | AAAATTAAAAATATGATACATTCACTACATGAAAATATGATATAC |
| | | | GGTTTTTCTTCAGTATCCGCGGGAGATTGGCTCGAGGAACCC |
| | | | CATGGATACCAACATCCTTGAATGCTCAAGTCCCTTATATAAAA |
| | | | CGGCATAGTATTTGCATAAAACCTATACCATTCTCCTG |
| 858 | AZGP1P1 | 3015108 | ATGGTGTCTGTCCTGCTGTCTCTGCTGCTGCTTCTGGGTCCTG |
| | | | CTGTCCTCCAGGAGACCCGAGATG |
| 859 | AZGP1P1 | 3015110 | TCATGCCTTGCAGGAAAGGTTTGGTTGTGAGATCCAGAATAAC |
| | | | AGAAGCACTGGAGCATTCTGGAAGA |
| 860 | AZGP1P1 | 3015111 | AGATGTTCTTCACGGTGGAAACGGCACTTACCTGACCTGGTTG |
| | | | TTGGTGCATGTGCCC |
| 861 | INHBA | 3047577 | GAGGCAGCCCTTTCTTATGCAGAAAATACAATACGCACTGCAT |
| | | | GAGAAGCTTGAGAGTGGATTCTAATCCAGGTCTGTCGACCTTG |
| | | | GATATCATGCATGTGGGAAGGTGGGTGTGGTGAGAAAAGTTT |
| | | | TAAGGCAAGAGTAGATGGCCATGTTCAACTTTACAAAATTTCTT |
| | | | GGAAAACTGGCAGTATTTTGAACTGCATCTTCTTTGGTACCGG |
| | | | AACCTGCAGAAACAGTGTGAGAAATTAAGTCCTGGTTCACTGC |
| | | | GCAGTAGCAAAGATGGTC |
| 862 | INHBA | 3047578 | CTTTTACTCTGAACTAGGTGGGCGCATTTCAAAAATTCGGATG |
| | | | GGAAAAAGCCTGGAAATTCCAGTGAATATTCAGCAAGGCCCTC |
| | | | TTTCATTGTACAGGGATCAAATTTCCTCCTCTTTTTTGTGCCCC |
| | | | CTCCCACTTCTACAAGTTATCCCCTGTGGGGAAAACAGGATGA |
| | | | TAATCAAAACTCTGGGCTGATGTTTTTCCAACTTAGTGTCTATT |
| | | | GGAATCAATCTTAAATCAGAAGCTTTTTCAGAAAAATAATATTT |
| | | | AGGCCAGAATTAGAGTTGAGTGTATTTTTTAAAAATGATTAAGG |
| | | | CTTGGTTGTGAGAAATATTACCTGTACCAGCTGGGAAAAATAA |
| | | | TGTCATCACTAACTAAAAGATAATTAATTTGAGAGAAAGTGTTA |
| | | | AGAGAGGGAGAGTAAGGAAGAGAACAGTTAAGAGGAGGCAG |
| | | | AGGTGAGGGCAGTAGTAAAAATCTCTAAAATTTTAATTTACAGC |
| | | | CAAAATTCTTCATGTGTAAATTTGTATTGATTCAGATGCAGAAA |
| | | | TGAAAAAAAAACACCTTTGTTTTATAAATATCAAAGTACATGCT |
| | | | TAAAGCCAAGTTTTTATCTAGTTTATTCTAGTACTTAGCTTGCC |
| | | | TGGAATA |
| 863 | INHBA | 3047582 | TGGAAAAAATCCTTAGCCAGGGCTCAGAGATGAAGCAGTGAA |
| | | | AGAGACAGGAATTGGGAGGGAAAGGGAGAATGGTGTACCCTT |
| | | | TATTTCTTCTGAAATCACACTGATGACATCAGTTGTTTAAACGG |
| | | | GGTATTGTCCTTTCCCCCCTTGAGGTTCCCTTGTGAGCCTTGA |
| | | | ATCAACCAATCTAGTCTGCAGTAGTGTGGACTAGAACAACCCA |
| | | | AATAGCATCTAGAAAGCCATGAGTTTGAAAGGGCCCATCACAG |
| | | | GCACTTTCCTA |
| 864 | INHBA | 3047583 | TATCATGCCAACTACTGCGAGGGTGAGTGCCCGAGCCATATA |
| | | | GCAGGCACGTCCGGGTCCTCACTGTCCTTCCACTCAACAGTC |
| | | | ATCAACCACTACCGCATGCGGGGCCATAGCCCCTTTGCCAAC |
| | | | CTCAAATCGTGCTGTGTGCCCACCAAGCTGAGACCCATG |
| 865 | INHBA | 3047584 | GGAAAAGGAGCAGTCGCACAGACCTTTCCTC |
| 866 | INHBA | 3047585 | GTGAGCAGTGCCAGGAGAGTGGCGCCAGCTTG |
| 867 | INHBA | 3047586 | TTGCTCTCTGAAAAAGTAGTAGACGCTCGGAAGAGCACCTGG |
| | | | CATGTCTTCCCTGTCTCCAGCAGCATCCAGCGGTTGCTGGAC |
| | | | CAGGGCAAGAGCTCCCTGGACGTTCGGAT |
| 868 | INHBA | 3047587 | AGACGCTGCACTTCGAGATTTCCAAGGAAGGCAGTGACCTGT |
| | | | CAGTGGTGGAGCGTGCAGAAGTCTGGCTCTTCCTAAAAGTCC |
| | | | CCAAGGCCAACAGGACCAGGACCAAAGTCACCATCCGCCTCT |
| | | | TCCAGCAGCAGAAGCACCCGCAGGGCAGCTTGGACACAGGG |
| | | | GAAG |
| 869 | INHBA | 3047588 | GGCTGTCATTTGTTGACCCCTATTCAAGAGGGTCTGTCACAGA |
| | | | AGACTCCTGCTTGCCTGAAATTTACGAGTGCATGTAAATG |
| 870 | INHBA | 3047589 | CTGGAACTGAGTGGTTGCTAAATTCAACTGCCCTGACAATGTG |
| | | | GGGATTTCCTGTCCATTAGCAGCGATTGCTATTTGACATATGTT |
| | | | TCTGGTGCCCATTAATCTGCCCTGTAATGGGTCAGAGGCAAAA |
| | | | ATGGGGGATTCAGAGGTACTAGGTGGCTCTCTTAATTTAATAG |
| | | | AACTCAATGCTAAGGACGCCTCTATTTGTTAATAAGTAATCAAG |
| | | | TCATTGGCTACTTTCTGCTAAACACTAGACTATGATAGTGACCT |
| | | | TAGACCCCGGGCATTCTAAACCAGGCTGGCA |
| 871 | INHBA | 3047590 | CAGATTTGTGCATGGGATACATGTACAGCAGACAGTTGTAAGG |
| | | | AGGTCCACGGTCATGGAAAAGA |
| 872 | INHBA | 3047591 | GCTGGATTTCCGTTAACTATAGAAATCCAGGCAGGGAGATCCT |
| | | | CCCAGGGAGTTGCAA |
| 873 | INHBA | 3047592 | AGAACTTGAAACTGTGCCTAAAATTTATAG |
| 874 | INHBA | 3047593 | GCCCTTGCCTCAGTGAATTTACCACTATCATAATCACAGTGTG |
| | | | CAGAGTGTGTTAAATTAAGAACAGAATCCACAGTACGCAATGC |
| 875 | INHBA | 3047594 | ATGAGGTCGGAGTCAGAGGAACTCCCCTTACCAC |
| 876 | INHBA | 3047595 | CTCCAGGCTAGTTATCCAAGGCTTGGGAGGTTTCCCTCGGCC |
| | | | TTCTCCTAAGGCCTTGGCAGGACCCTGCCACCCTAAAATCAAC |
| | | | TGCTGATTGCCTTTTTAGATTTAAATGATTAAGCTCTGCTTATG |
| | | | GGAATCTTCTTCTCTTTTATTTTGTTAAGAAACAAACAACAACA |
| | | | ACAAAACCCACACCAATTCTTAGCAAAGGGGAATATCGAATTC |
| | | | AGATTTTGAAAAAATAAGTCATCATGCTTCCTAAAATAAGACAG |
| | | | CTTCTCCCTCTAACTGCTCTCTCTGCTCTGGTATTCTATCTA |
| 877 | INHBA | 3047596 | AGGATGTACCCAACTCTCAGCCAGAGATGGTGGAGGCCGTCA |
| | | | AGAAGCACATTTTAAACATGCTGCACTTGAAGAAGAGACCCGA |
| | | | TGTCACCCAGCCGGTACCCAAGGCGGCGCTTCTGAACGCGAT |
| | | | CAGAAAGCTTCATGTGGGCAAAGTCGGGGAGAACGGGTATGT |
| | | | GGAGATAGAGGATGACATTGGAAGGAGGGCAGAAATGAATGA |
| | | | ACTTATGGAGCAGACCTCGGAGATCATCACGTTTGCCGAGTC |
| | | | A |
| 878 | INHBA | 3047597 | TGCTTTGGCTGAGAGGATTTCTGTTGGCAAGTTGCTGG |
| 879 | INHBA | 3047598 | CACACAAAAAAACCTGCGCGTGAGGGGGGAGGAAAAGCAGG |
| | | | GCCTTTTAAAAAGGCAATCACAACAACTTTTGCTGCCA |
| 880 | INHBA | 3047599 | CCTTCTCTCTTACTCGGAGACAGTCAGAACTCTCCTCCCTGAC |
| | | | AGCCACAAACC |
| 881 | INHBA | 3047600 | GTGCCAATACCATGAAGAGGAGCTCAGACAGCTCTTACCACAT |
| | | | GATACAAGAGCCGGCTGGTGGAAGAGT |
| 882 | INHBA | 3047602 | TTGGGGCATCTTGAAAGTGTCACTGCAGTATAGCAATCTCTCT |
| | | | CAGGTAATATAGAGATAAAGGGAATATAATAAATTGACCTGTTA |
| | | | TTTATTATCTTTTTCATACCTAGGACATTCCGAGGCTTAATATAT |
| | | | TTCTGAAGCCTACAGCCCTGATAAACATCAATCCCACGTCAGT |
| | | | TTCCAGCAGTCTCATCTCCCCACACCCTTCTGCAATGAAAGCT |
| | | | AATGTAAAAGAAAGAAATATGCACTGCTTAATAAGTCAGAATAC |
| | | | AATAGAACTTGTAAAATGTACCTGCATATAAGGTAGACATTAG |
| | | | GAAGACTTGAATCTCTCTCTTCCCCCTGTTCTCCTGAGCATTAT |
| | | | GGCAACAGCATTT |
| 883 | INHBA | 3047604 | ATGCCTTTAGGGGTTACACGCTCTCTTCCGTGAATAATGGGGA |
| | | | AGAGCGGCCACAAGAGGGCGCGTTCCAAAGACTTTTGCTCCT |
| | | | TGTCAGTGTATCCAGGGAAAGGCAGTTGCGCGTACTGGAAGC |
| | | | CCCTGTCTGTAGCGCCCTAATCTTGGTGATTATCAGTTACCGC |
| | | | CTGCTC |
| 884 | INHBA | 3047606 | GAGGGTTGCTTCCTGTCTTTGTATACCAACCTCCACACATGAT |
| | | | GGATTCAATGACAGCTCGTATCCAGTTGCCTTTAACCATGTCA |
| | | | TATGACTAAGTATACCTATGCCTTTGACCACTTTTAACCGCACT |
| | | | ACCGTTACTAGCAATATGCCCCTCTTTCTGACTTACTGGACTT |
| | | | G |
| 885 | INHBA | 3047608 | ACCAGGGCATCTTTCCGGGGGTGCAGATAGCCTGCTGGCTGT |
| | | | GTGGCTTCCCCTTGCAGGAGAAGCCCTGGTGTCCTACAAGCT |
| | | | TCCCAGTTTGGCTCTCTCAC |
| 886 | INHBA | 3047610 | AGTGACAGTCATTTTTACCTTTAGAAAATGTCTATAAGTGCACA |
| | | | GGCACCACATTCAAGACAGGGAAGAGCTACTTTGGGGGACAG |
| | | | TTGTCATTGAACCAGCAGTTACTT |
| 887 | INHBA | 3047612 | AGCCGGAGGAAAGCCGCGGCATTTTCGGGTGCTAGGGGAGC |
| | | | AGA |
| 888 | INHBA | 3047613 | ATTAGGTGATGGTAGCGGACTAGCCGACGGAGGGCAGGCAG |
| | | | GGGAGGGGGAGAGGACTTTACAGAAAAGGAATTCTCGGTCGA |
| | | | GCTCTGCCTGGAGATGACTGGCTTACACTTACTAAACCCAGCG |
| | | | GGTCA |
| 889 | INHBA | 3047615 | ATTGATGTTTCTGGAGCTGAAACCCCAAAGGTGTTAGGTTACT |
| | | | TGTAACAGAAAAAGTCTTACAAATAGTTGTTTTGGAAAAGGGG |
| | | | ACAGTATATATAATTCAGAAAGCATTGTTAACCTGTGCAAACTG |
| | | | TAATTATAACTTAGTGTCACAATTTTCTTGCCCTCTTCCCCTTG |
| | | | CACTCAGATCTTATCTTGTAGTAATGATATTTATTAACTCTTTCC |
| | | | ACCTAAACTGCATTGCTTGACTGTAATGCTATGAACACACTAG |
| | | | GTG |
| 890 | AZGP1 | 3063591 | CACAGTCAATGGATCCACAAGGCCTGAGGAGCAGTGTGGGG |
| | | | GGACAGACAGGAGGTGGATTTGGAGACCGAAGACTGGGATG |
| | | | CCTGTCTTGAGTAGACTTGGACCCAAAAAATCATCTCACCTTG |
| | | | AGCCCA |
| 891 | AZGP1 | 3063592 | AGCCCCTCGTGGTGCCCTGGGAGGCCAGCTA |
| 892 | AZGP1 | 3063593 | TCTTCACAATGGAAATGGCACTTACCAGTCCTGGGTGG |
| 893 | AZGP1 | 3063594 | GGCAAGAGGGAAAGCGTCAGCCTTCCCTGATATTCTGGAAAG |
| | | | TCTCCCGGGGCTGGGGGTGGGCAGGTACAGAGCTTCGAGCT |
| | | | CTGCTGATCGCTGACATCCAGGG |
| 894 | AZGP1 | 3063595 | AGGGTAACACTGTCTGTAAGAGGCAGAGCTGGGACTCAAATT |
| | | | CCAGATTTCAGATTCCAAATCCCATCGTTTTTTATCTCTACAAT |
| | | | GATGCCTCCCATCTGGGTGGTGGAGAGAAGGGAGGCGTGTA |
| | | | AAATGTCAGCCCCAGAAGGACAAGAGCAAGCCAGTGTGAGCG |
| | | | GAATTGATGGCTGCAAGCTGAGACTTGGATTGGAGACGTAGT |
| | | | GAGACTCAGGATTGTGCAGTGCTGCAGGGAAGTGGTTGCTGG |
| | | | ATAGAGGCATGGGCTGAACCAAGCAGCTGGACTGAGACTGGG |
| | | | GGACAGAACTCCAAAGCCCACTGAGATGTGGGAAAACATGGA |
| | | | GAAGCACACGGAGCATTCACAACTTATTGCCGTCAGAGTC |
| 895 | AZGP1 | 3063596 | GAGCCCAGAATAAAAGACGATCTCAGGCTAGGAGCTCAGGCA |
| | | | ACATCTTAGTCCGGTCTCATCTGTTCCTGGATGTCCCTCAGAC |
| | | | CCCCAGCTTTCATCTTTTAGGATTTATTCCTTCCCTGGGATAAT |
| | | | ATAATTTGTGGTCCAAAAAGAACATCATCAAAATTTCAGGCAGA |
| | | | ATGGGCCAGGAAG |
| 896 | AZGP1 | 3063597 | CCAGTCTACGTGCAGCGGGCCAAGGCTTACCTGGAGGA |
| 897 | AZGP1 | 3063598 | TGAGATCGAGAATAACAGAAGCAGCGGAGCATTCTGGAAATAT |
| | | | TACTAT |
| 898 | AZGP1 | 3063599 | GATTTCGCCATATCACCCTGGCTGGTCTGGAACCCCTGGGCT |
| | | | CAAGCGATCCACTCGCTTCAGCTTCTCAAAGTGCTGGGATTAC |
| | | | AGGCATGAGCCACAGCGCCCAGGCTGTAGCTCTCTTAAGGAG |
| | | | GAACATATCTCATCTGAGACAAACCTGAAATGCCAAACCAAAC |
| | | | TGAGTTAGCCCCTCTCTGTCTGTTGTATATATTGGAGTAATAAC |
| | | | CTATTTGTCTTGATAAAGGGATTGCATGCTTGAATTGCAAAAAC |
| | | | CTTTATTTCTTTTGGGTTGCCCAATGTGCAAGACTAAGAGT |
| 899 | AZGP1 | 3063600 | CATACGATGCAGACCCAGGAAGGGCCACCTGCGCTATGGTCA |
| | | | GAGGA |
| 900 | AZGP1 | 3063601 | GGAGACCCTGAAAGACATCGTGGAGTATTACAACG |
| 901 | AZGP1 | 3063602 | ACACTGGGCTGTCCAAGCATGTTGAAGACGTCCCCGCGTTTC |
| | | | AGGCCCTTGGCTCACTCAATGACCTCCAGTTCTTTAGATACAA |
| | | | CAGTAAAGACAGGAAGTC |
| 902 | AZGP1 | 3063603 | TGCTGCTTCTGGGTCCTGCTGTCCCCCAGGAGAACCAAGAT |
| 903 | AZGP1 | 3063604 | CCCGTCCTGGCACTCCCATTGGCCTGTAGATTCACCTCCCCT |
| | | | GGGCAGGGCCCCAGGACCCAGGATAATATCTGTGCCTC |
| 904 | TRIQK | 3144581 | GAGTCTGTCACAGTTTCTTTGTGTAA |
| 905 | TRIQK | 3144582 | GCCGGTGTTATTTACTAGATTCTTCCCTTTGAACTCACAGACTC |
| | | | AAGAGACAGACCAAGAGTTCTTATATACTCACCACAGCGGACC |
| | | | AATCCAAGTGGCATTTTTAGGAAAGGTTGCAGCATTTAATGCC |
| | | | ATGTGGTATGTCTGTTCGTCAAGTGGGTGGCAAGGGAATATCC |
| | | | AAGCTGGCATTTTGGATATGATGGGCCTTTTACTTTCCTGAGT |
| | | | GACATGCCACATGTCAAGAAATACTGCTCCCCACCCCCCCACT |
| | | | CCCATCACATTTACGTGAACAATTTTCATTTAGTTATTTCCCGT |
| | | | TCCATATGGTGTTAAAACAGTCGTATTAAATAAAGATTATTTCT |
| | | | AGTTTTCAGTGGTAATTTAAATGAGAGGATATGTAATAATTGCT |
| | | | TATTAGATACTTATCCAAATGAAATATAACAGAGTTTACAGTAC |
| | | | TTAAAATGGCTGGTTATGGTCTTGGAAATGTTTGAAAATTCATT |
| | | | ATCCTGAAAAAAACTTTACCATTCTGTTTTACCCTTGAGGTATT |
| | | | TTTTGGGGAAAAATGTTTTTGATAACTATTAATCTAAATATAGTA |
| | | | TAATTATAGGCAAATTTCACTGCCTAGTTTTATTGATATCCTGA |
| | | | GTCTACAGCTAGTCCATTCGTATGACTGATTGATTTATGATAGC |
| | | | TCCAGAGAACCATAAATTTCAAAGGCTAAACTCTCTGATTTTAG |
| | | | TAAATAGTAGGTAAAGTGACACAATATATGTTTACACAACACTG |
| | | | TTTTCATGAAATGCAAACTTTGCAAAACTCACATTAACTGGGAA |
| | | | GCAGCCAACCCTCTGTAGAGAAATCCCAGATTGGGAGTCTGG |
| | | | TTTGAATCTTTGAAGACAGAAAGGTGATATCCGGCCTGCTGTT |
| | | | TTAAAGGGACCACACTTTTGAATACCTACTGGTGTTTGGCAGA |
| | | | AATCTGAGACTGGCACCAGACACAAATTTTAGACATGGGTATC |
| | | | TTCCCTCCAGTA |
| 906 | TRIQK | 3144583 | TGCTTTGACAGCCACCCTATACATGGTACATTTAGATGAAATG |
| | | | GGAACCAGATCCTAAATTTTTCAAATGTCATTGCCAATTTATGT |
| | | | GTATAATTCCATCACTTCCTGATGAGTAAGTCTATTTTTGTTCT |
| | | | ATATACATCATAAGTTAGTATATATTCTTATTTACAGAAACATGC |
| | | | TCAAATCACATTCAGAAAGAACAAAAAGTCATGGGAAATTTTTT |
| | | | ATTTTACAACAAAGCCCTGCTTTCTTTCTGGACGTATTTTACAT |
| | | | CATTAGAGAGACTATCTGCACATACATCTACCATAATCTTTTTC |
| | | | CTTCTTTGCCAACTGTTCAGTGCACATGTGCTGCATCAGAAAT |
| | | | GGCACCTGGATGACAGAAGCTCAAAGAGTCACATATGTCTCTA |
| | | | AAATAGAGTTCTTTTCCTCTTGGGCTGTCTGAACTGGTGTAAAT |
| | | | AGAAGCTCAGTTGATCTTGGTTTTAATTAACTTATTACTCTATTA |
| | | | ATATAACCTTGGAATTCTATTCTAATTATGTTGTTCTGGCTGCT |
| | | | TGTAGTATCAGTTCGCCCCTCTTGTTAGGGAGATATGTAACAA |
| | | | TCTGTCATTTAATTGAGCAGTCTTTTTCACATAACAGTAATAGC |
| | | | AAAAATCCTACCTACTCAGAATCATCTTCTTAGGTTGTCTCCTA |
| | | | AATCTGAACAATACAGTTGTTTTATAAAATTACATTTTGTCTCTT |
| | | | GAGATTTAATCAATTAGAACTCTTTAGGGAGAAAATAAATAATA |
| | | | GAAGAAAATATATGCCTCATATTTCATATGTAATTATCTGTTGAT |
| | | | ATAATTTTTCAATGTATTTTGTATTTGTGGGAGCATAATGACCT |
| | | | GTACATTC |
| 907 | TRIQK | 3144584 | CTCACCACGGATGTTGACCCTGATCTGGACCAAGA |
| 908 | TRIQK | 3144585 | GAAGTTGGCCTTGTACTTGCAGCTATATTGGCACTACTACTGG |
| | | | CTTTCTAT |
| 909 | TRIQK | 3144586 | GCCAAGGTATTACTACCAAGCTGTAACAGCTGTTGAACTGCCA |
| | | | GATGATATATTTGGTTGTCTTCCAGAATTTGCTATTATGATCAC |
| | | | GAAACACTGCCTTCTTTTCGCTCCTGATTG |
| 910 | TRIQK | 3144587 | TTTACGAGCAACCAAATTAAAAGCAG |
| 911 | TRIQK | 3144588 | AAAGGAGGCATTACAAGTGATATTTCAGAAATAAAAAATACAA |
| | | | GCTACTTTGGGTAACTGAATGCCAATAAATTAGTTAACCTAGA |
| | | | GGAAATGGATAAATTCCTAGACTCATACAACTCACTAAGATTG |
| | | | AACCATG |
| 912 | TRIQK | 3144589 | ACCTGATGAGCAAAATGGCTGAACAGAATCCTCTAGCGATCAT |
| | | | CCCCCCACAGGAACACCAAACTGAACAACTATTCACACAAAAC |
| | | | AAGCACCTTCATAAGAAGCAAAAAACAGGTGAACCGGTACCTG |
| | | | GCTTTAACATCGTATTAAGGAAAGAGGCACTGAAGAGGATTTG |
| | | | AAAGACAATCTTGAGTCACCTATACCACCCCTTTCCCGTACTT |
| | | | CACCTTTGGCCATGTGGTGTTAAGAGACAATCTGTGCACTTGC |
| | | | ATGAGGGAGAGTGCAGTGATTGTGGGAATTTGCCTTGGAACT |
| | | | CAGTGCTGCCCTGTCACAGTGGAAAGCCACACAGGGAAGAAC |
| | | | TTAGCTGGTGCCCACA |
| 913 | TRIQK | 3144590 | CCTCCTAACTATGCATGTACCTTTCACATTTTATTGCAAAACTA |
| | | | TTAGGCTATAATAAGAACATGCATCAAGCAGGGACACCAATAT |
| | | | CTTGCCTGGCATTTAATTATCAAAAACACCTGTGCTACAATAGT |
| | | | ATATTCACGTGTATAATTCTTTATATGTAGACATTTAAGTGCTTG |
| | | | AATTATTTAAAAAATCTACTGTCTGGATAAAACTTCCATA |
| 914 | TRIQK | 3144591 | GCTACTATAAAACTTCCTGTTGATCAGTACAGAAAACAA |
| 915 | TRIQK | 3144592 | TTGCTTGTGACATGACTAGTTCTTGTCTGACTTCATCTTCATCT |
| | | | TGTAATGCCTTACTAGAAGGAATGAGGAACAACTTGCAGACAC |
| | | | CAGTTTGAAGAATACTTACGACTGTAACATTGTATTCTATGAAT |
| | | | AATGACATATTGTAATTGAGGCTAGGAAATAGAGTCTGTGCTA |
| | | | GGAAGAAAAGGAGAATATGAATGTGGTAATCAGGTTGTACTCT |
| | | | CTGCTGCAATA |
| 916 | TRIQK | 3144593 | AAACAAGTTGGTTGGATAGCTGTCCTCCATGCAGTCATTCATG |
| | | | ATCCAGGCTGTCATCATCTTCATCACTCATGTTCAGAGTTACC |
| | | | CTAGAGGTCATCTCCATTTCATCCAGATAAATGAGTATGCAAG |
| | | | GAACGTTTTTA |
| 917 | TRIQK | 3144594 | CTGCTGGGATGTTGGCTTAAATGACTAGAAAGGAATTGGGGG |
| | | | AAGCATAATGAGTAACCATTTTGGCAGATAGCCTCAGTGATTT |
| | | | GCTTTAAGAAAAAATTAAGCATAGTCTGTAAAGGCAAAAAACAA |
| | | | AACTAAATTGAAAAGGGAATAATATCTTGAGTGTTTATTCATTT |
| | | | AATCCAACTTCTCTCCTAAAATGGAGTGGTATCTTCCCTAGCC |
| | | | ACACACA |
| 918 | TRIQK | 3144595 | GCTAATGTCTCCCTGGATTTCTTGGGAGTTTGCTATCTAACCAT |
| | | | CAAAGCAATAGAAATGAATGATGATTACTGCAAGGCTTTGAAG |
| | | | AACAAAGAAAAGTCAGAACATTTTAAAGGTTCTACATGTCTGA |
| | | | GTC |
| 919 | TRIQK | 3144596 | ATGGGGACTCCTCCATTTACCAAGGCTACAGCTGACTCCTGGA |
| | | | GAGGCCTGAGTACTCATTGCAGTTT |
| 920 | TRIQK | 3144597 | CCTTTTGTTTGATTAAGCTCTTAGCGTGCAGTG |
| 921 | TRIQK | 3144598 | CAGTCTGAAGGTTTGTCGGGTAATAGTCAAGTGGATATGAAAC |
| | | | TGCCCTTTGTGAACCTCAG |
| 922 | TRIQK | 3144599 | GGGAAGCAACGTCAATCAGTGGTACTGGAAAATGAGT |
| 923 | TRIQK | 3144600 | TTGGTGTTTGCCTCATTTGAGCCTGGTTTGAACAGTTGGCCAC |
| | | | CTTTGGCCAAAACTCAGTGATTGGCACAAAAGTCGGTTGCAGT |
| | | | CTGTTTACACATGGAAAGGTTACAGTTTACTGTGCACAGAGAA |
| | | | ACCATTAGGTCACATTTAGAATATATAAGGAGGCAGCATTGGG |
| | | | CTAAACTTGACAATTGCTTATT |
| 924 | TRIQK | 3144601 | CGATTAGAGATTAAGTTGCCAGCTTTAAAAATGGGGACTAGTG |
| | | | TGTAAGCCTTTTGTATGTACATATGTACATGCACTAAGTATGTA |
| | | | AATACATACATATTGTGAGACTAGGTTCTCACAGTAAATATCTG |
| | | | ATAAAAATCCCTGGGGGAGGGGAAAAGGAACCATTTTGAAATA |
| | | | CACCACAGCACTCTGTTCTTAAAAAGGTCTCTCCTCAAGAGAA |
| | | | ACTAGTGTATATAAAAAACTTACTTTCTAAATGTAACTGTTACTC |
| | | | TACTAATCCAGAGTTTCAAACATGTGTGAACAATAAGATAGCAT |
| | | | ACATAATTTGGCATTTTAAAAGTTATCCAAAGATACTTTTGTAG |
| | | | AAGCCACTTAGC |
| 925 | TRIQK | 3144602 | TTTTCTGGCAATGAACCTGGGTTCCAAGCATAGGTTTTTCTTAT |
| | | | GGAAGGCAGTTTTACAATAAGGAAATGTTTTTACTTGTATTTAT |
| | | | TTTGTGATATTTCAGCAAATCCAAATAAATGTAGTAACATTTATA |
| | | | AAGCTATACATTTATAACTGATTTATTTGTTAAATATTTAGTATT |
| | | | ATCAATTGTCTGTTAAAGATTTGTTGCTACATTAAATGCTTGGT |
| | | | CTGTCTTGATGTTCAGTACATTATTATACTTTGGTATATTGCAAT |
| | | | ATTTTGATAATTATGTATTGGTTTTAGTCACTGTTCCTGCATATT |
| | | | AAGTAATAAACAGATTAATATCATCATAAAATATCATTTACTCAG |
| | | | CAATATTTCTTAGTAAATTGATACATCCATTTTTCTTATGTATTG |
| | | | TGGAGAGAGGAAATATGACATAAAATGGAAGAATATGGGCCTC |
| | | | TGTTTATCTCTGACCTCATCGCTTACTGTTCTTTCCCACTCCTC |
| | | | ACTCTACTCAAAGCCTTTAAATAGCTCTCCATTTTACTCAACAT |
| | | | CAAATCTAAATAAAGCTCTTAAACTGGTCTAAATGTCTCTACAG |
| | | | TACTTGAACCTTTGTTATTTCTCTAATTTCATCTTCAACTCTGCT |
| | | | CATCGTTATTCTCTTGCCCTGGGCATACTGCCTCCCTTTTTGTT |
| | | | CTCTGAACGTGCCAGGCATTTT |
| 926 | TRIQK | 3144603 | CAGGAATGCAAGCACTGCTACCTAACTAAAGACCTTGGCTTTG |
| | | | GAAACATCTTACCCCTTGGCAGCTCTCCAGAGTTTAGACTTGG |
| | | | CAGCATCAAAGAC |
| 927 | TRIQK | 3144604 | TCTTCCAACGTCAAAGCCAGCAACATTGCAGCAATCTGACTTA |
| | | | TTTTGTTGTCATGTCTCCTGACCACATCTGGAAGGGTTATCTAC |
| | | | TTTTGAAGACACATCCAGATAATTCAGGACAATCTGTCCATTTT |
| | | | GAGGTTCTTC |
| 928 | TRIQK | 3144605 | GGAGCTTGGTGTATTCCTGAATCCATCAGATGTTGGTGTCCGC |
| | | | GTGGATGACTAGGAAAAGGGGATTGGAGATTAGGTTTCTTCTA |
| | | | CTTGGAGTTCTCTGCTGCTTGTTTGAGCTTAATAAGCCTCCTG |
| | | | AAGAAGTTGAAGCAATTTATTGCTAGAGGAGCCCCAATGTATA |
| | | | ATCTCCCTTTCATTCTCTACTGTGGAGAGGTGTGCTAAACCTG |
| | | | TAGAGCTGTTTTTGCTTCACTCGGCTCATACTTAATG |
| 929 | TRIQK | 3144606 | CCGGGAATGAAAGCGGGCGCACCTCTTTAGCGAGCCCTAAAG |
| | | | CGTTTGGGAGACGATCGTTCCGTCCCTGGGAGCGGCACTTGG |
| | | | TGGGGCTGGGCGGAGGGAGGCTCTGCAAGAGAAACCCGGAG |
| | | | TCCG |
| 930 | TRIQK | 3144607 | CCTGAGTGACAGAACCGTGGACAGCAACATTTCCCACAGGAC |
| | | | ACGAAGTTTGTCGGCCCTTGCCTTGGCAG |
| 931 | TRIQK | 3144608 | GATGTCCAGCAGCTAGTAGATGTAGAAGTGCTGTTTGTTACTG |
| | | | GGTATGTCCTTGCTGTCAGGGAAGTGCACCTGTTTCAG |
| 932 | TRIQK | 3144609 | GCTAAAACTGGTAAGGTGCCCATGGGTTCCATGGAACCTCCA |
| | | | CATCCATTTACAAAGCCCTCTAGGAAGACTGGGCTAGTTGCTT |
| | | | TCTTCAGCTTCAGTATTATGG |
| 933 | TRIQK | 3144610 | ATACACCTTAAGCAACCAGGTATCCTTGATTGTGGGAGTTCCT |
| | | | TGGAACATGAGCAGA |
| 934 | TRIQK | 3144611 | TAACCTGGACTTTCATAAAACTGGCATATCTTCTGTTTTACATG |
| | | | GAAAATTATTTTATCTTAAGTTTCCATTTAGTTGATTAAAAATAG |
| | | | GGTTATGAATGTTAAATAAGTGATGATTTATTGCAAAGGAAATA |
| | | | TGTTTCGAAAGGTCGAATA |
| 935 | TRIQK | 3144612 | GAGTCCCCTGGTCTTTACATATTAAAAATATTAGGCTGTCCTG |
| | | | GAAATGTTGTCTTATTTGTCTGACTTCACCACTAAAGTATGAGT |
| | | | CCCTTAAGGTTGTCATTTCATTTTTGTAGTCCTTATGCCTAAAA |
| | | | TAGCAACA |
| 936 | TRIQK | 3144613 | TATCCTGCTGGTGAGTTTGGGAAAAGGAATTGGATCGGGGCA |
| | | | TGCAGCGTCTCCTTATCTGCAAACAGGCCTGCCGGTGGGAAT |
| | | | CATGGTACTGTTCCCCAGCAACACAACATTAATTTCAGAGGGA |
| | | | GATGCTCTGCCACTACAGGAGTG |
| 937 | PABPC1 | 3146782 | TGACACCGCCATGAAAACGATCAGCACCGTCGAATCCTCACG |
| | | | CCCCACTCAAGTTCCTTGATTGCTTCAATAATGTCCTCCGTAG |
| | | | CAAAAGGATCTAGTTCAAAATCGGGAGTTACATTTCATTGTCAT |
| | | | GCCTAAAACGTAAGAATTGCTCATTCACTTTGGAGCAGTTCTT |
| | | | CAGTCTATCCTTGATTTTCATGACCTTGACACTTTTGAACATTA |
| | | | TAGACCAGTTATTCAATAGAATATCTTTCAATCTGGGTTTGTCC |
| | | | GATACCTCTTTATTATTAGATTGAAATGATACATTTTGGTGGAA |
| | | | CTATCACAGAATTGACATTGCATTCTTCTCATTACATCCTGTCT |
| | | | GGTGGCCTG |
| 938 | PABPC1 | 3146783 | AAAGGAATCCTAGTGACGAGTTGTCTTGAAAGAGAAGAAAAAA |
| | | | AGTTAAAAAACAGAAGAAAAAGGAGATCTTTAACCGTGCTGGG |
| | | | TATAAAATTCTAAGTCAGGATACTTTTCTTCCTTTGAGCATCTTT |
| | | | GACTGCCTGGGGAATATCAGACATTCTTTTAGTGGCCTTGTGA |
| | | | TCATTTTGCTGAGCTTGTTCATATTCCTGTTC |
| 939 | PABPC1 | 3146784 | GCATCAAACTGAACCGCGACTTGTCCAAAGTCACATAGTAAGT |
| | | | GGAGGTGGAACTGGGCTTTAAATCCAAGCCTACATACAGACTA |
| | | | GAGTTCACACTTTTAGGCTTGGCATAAACTGCCTATAAACTATA |
| | | | AAAAAGTAAAACTCCATAAAATCTCAGGTACTTGGACTACCTTC |
| | | | AGTCTGA |
| 940 | PABPC1 | 3146785 | AGTATGGGTGACTATTCTTTACAAATCCATTTGTGATGCAGTG |
| | | | GTAATTTGGTGGCACTGCAATTATGGCCAGCAATGAAGATTAT |
| | | | AAAATAATTGCCTGAGGAACCAAGCTCATGTGCACTAAAAAGA |
| | | | AGCAGG |
| 941 | PABPC1 | 3146786 | CTGCACTTGGCCCTACACCGATGAATTTTT |
| 942 | PABPC1 | 3146787 | TGCTGAGCCGACATAAGAATCTTTTATGAAAAATGTACTGTTAA |
| | | | GTTCAGGGGGTCTATTGGTTTTATGTAAAAGGCACAAGACAAT |
| | | | TCCTGTAGTGCATTTTATGAGTTAAGGTTTCCATACGGATTATT |
| | | | GAAACAATTTGTTACATGTATTTGTTACATGATCTTAATATTTCA |
| | | | TGTACAAGACTGACACCCATCCACTTTTGAAGATAAGCCAGTT |
| | | | TATGGGGTTTTTTTTTTTGCGGGTAGAGGTTGGGTCTCCCTAT |
| | | | TTTGTCCAGGCTGGTCTCGAATTCCTGGGCTCAAGCATAAGCA |
| | | | TAAGGC |
| 943 | PABPC1 | 3146788 | CCTTATGTACCGAGCAAATGCCAGGTCTAGCAAACATAATGCT |
| | | | AGTCCTAGATTACTTATTGATTTAAAAACAAAAAAACACAAAAA |
| | | | AATAGTAAAATATAAAAACAAATTAATGTTTTATAGACCCTGGG |
| | | | AAAAAGAATTTTCAGCAAAGTACAAAAATTTAAAGCATTCCTTT |
| | | | CTTTAATTTTGTAATTCTTTACTGTGGAATAGCTCAGAA |
| 944 | PABPC1 | 3146789 | TGATCAGGGACCATGAAAAGAAACTTGTGCTTCACCGAAGAAA |
| | | | AATATCTAAACATCGAAAAACTTAAATATTATGG |
| 945 | PABPC1 | 3146790 | CAACCTGGAGTGCATTGACGCGATCTCGGCTCACTGCAACCT |
| | | | CCACCTCCCAGGTTCAAGCAATTCTCCTGCCTCGGCCTCCCG |
| | | | AGCAGCTGGGATTAACAGGCCCATGCCTGCCACCGTGCCCAG |
| | | | CTAATTTTTGTATTTTTACTAGACTTGGGGTTTTGCCATGTTGG |
| | | | CCAGGCTGGTCTGGAACTTCTGACCTCAAGTGATCCGCCCAC |
| | | | CTCGGCCTCCCAAAGTCTTGAAATTACAGGCGTGAGCCACTG |
| | | | CGCCCTGCCAGATTTTGTATAGTAATATATATATAAAATGACCT |
| | | | GTCACAGGTTGGCTTTCATAGTTTTACCTTTCCTTTTTGGGTGG |
| | | | TGCCCTTGGGTCTCTACTACTGTCTTTCATCACTCCCAAGAAAT |
| | | | TGAGTAGTGCAGCCAGGATCAGGACCAGGGATTGGCAAATGT |
| | | | TTTTTGTAAAGGGCCAGATAGGAAATATTTTGGGCTTTGAGGA |
| | | | CTGTGTTATCTCTGAAATGATCTTGTTCCAGTGTTACCATGTCA |
| | | | AGAC |
| 946 | PABPC1 | 3146791 | ATGAAGCTGTAGCTGTACTACAAGCCCACCAAGCTAAAGAGG |
| | | | CTGCCCAGAAAGCAGTTAACAGTGCCACCGGTGTTCCAACTG |
| | | | TTT |
| 947 | PABPC1 | 3146792 | GTACAGTTGTAAAGTCTGCATAATAACCTGTGGCGCTATTTATC |
| | | | CCCATTTTATAGATAGGTAAACTGAAACAGGCTGAATAATTTGC |
| | | | CAAATGCTCACACAGCTCTTAAGTGGCAGAGCCTGGCTTCAAA |
| | | | TCCCATCAGCTCCAACAGCCATACTCTCAACTGCTGCTGCTTT |
| | | | CTCTAGTGGAGAAAGAGAAATATTTTTCGAGTGTGGGGAGGA |
| | | | CAAGGAAAGAGTAGTGCAGGGGAGCGATTCATAATTCT |
| 948 | PABPC1 | 3146793 | GCCATGCACCCTACTCTTGCTGGTA |
| 949 | PABPC1 | 3146794 | TCCTCAAGAGCAAAAGCAAATGTTG |
| 950 | PABPC1 | 3146795 | AATGGGTCCACGTCCTGCAGCTGCA |
| 951 | PABPC1 | 3146797 | TGCAAACCTCAGATCGAAGAAGACAGCATAAACACTTTTCACT |
| | | | CAGTAAGTTTTCCCAGTTAATGTA |
| 952 | PABPC1 | 3146798 | TCAGGTATATTTATAAGTGTGGGCGGCAAACCACCC |
| 953 | PABPC1 | 3146799 | AACCGTGCTGCATACTATCCTCCTA |
| 954 | PABPC1 | 3146800 | CAACCAGAACCATGAAGGTTTTCGTATTTGGTCATT |
| 955 | PABPC1 | 3146802 | TTATGATGGAGGGTGGTCGCAGCAAA |
| 956 | PABPC1 | 3146803 | CTGACCTGGCTAGGGTAATGCATATGTGTAGTTTGCCCTTAAT |
| | | | AATTGGGTATTAAGGAAAAATTGTGAACTCAATGGGTAAATAC |
| | | | AAGATGATTAAGCATTAACAGGGTTTAGTTATTTGATTCAGTGA |
| | | | TTTATAATTGTCTAA |
| 957 | PABPC1 | 3146804 | GGAGTACGATAGAATTTATTCCTGAATGTTTTTGTCTTCAGTGT |
| | | | GTTCCCTGGATATTGTTTAAATTGAGTGTTGTGCATCAGCATAT |
| | | | TTTGAATGTATGAAGCATGCATGTTTTTCTGTTTCTTGAGACAG |
| | | | GATCTCATTATGTTGCCCAGGTTGGAGTGCAGGGGCATGCCA |
| | | | CAATCACAGCTCACTGCAGCCTCAGCCTTTCCTGGGCTTAAGC |
| | | | CAAGCTTGTCCAACCCGCTGCTTGCAGGCCACATGCGGCCCA |
| | | | AGAATGCTTTTA |
| 958 | PABPC1 | 3146805 | GATGATGGTATTGATGATGAACGTCTCCGGAAAGAGTTTTCTC |
| | | | CAT |
| 959 | PABPC1 | 3146806 | TTATGTTGGTCGAGCTCAGAAAAAGGTGGAACGGCAGACGGA |
| | | | ACTTAAGCGCAAATTTGAACAGATGAAACAAGATAGGATCACC |
| | | | AGAT |
| 960 | PABPC1 | 3146808 | TGCCTTGGCCCATACATCTTCTAAATTTCTGTAATCAAATGTGA |
| | | | TTTTTAACCTTTTCTGCCCCACTTGCCTGAGATACCACCCGCC |
| | | | TCAGTTACCTGTCTCTCCTACTTTAGAGGGAGTTAGGGGAAAA |
| | | | CATGTCTTCAGAAATAAATGCTTCCTCTTCCAGGTAGTTCACCT |
| | | | GTGTCTTTAAAAAGAATTTTTTTTCCCTGTCTTTCAAATTCCTGT |
| | | | ATTACCTATGTCTTACCAAAGAGTCCAACTATGTATTCCTTCCA |
| | | | CTCCTGTTGAAAGTCGGGTAGGCCAAGGCTTAATAAATACTTG |
| | | | TTTCTTAATTGATACAAAGAAAATCAAATTGGTCTTAGCACAAT |
| | | | AGCTCATGCCTGTAACCCTAGCGCTTGGGGAGGTCAAAGAGG |
| | | | GAAGATACTTGAAGCCACAAGTTTTAGACTAGCCCGG |
| 961 | PABPC1 | 3146809 | TTTGTTGGACGATTTAAGTCTCGTAAAGAACGAGAAGCTGAAC |
| | | | TTGGAGCTAGGGCAAAAGAATTCACCAATG |
| 962 | PABPC1 | 3146810 | TTAGAGTACACGATTGGGAAGTTTAAATTTTTATTCTAGGAGAT |
| | | | GGCAAAGAAAGCGCAAGCGCCACTTTAAAATGACGATGAAAG |
| | | | CTTTTTAATTTGATAGAGGTCTTTTTATTGGCATGGTACACATG |
| | | | CACTTCCACTCATTTGTATTGATGGGAGTGATCCCTTTAACCCT |
| | | | AGGTTAGCTAGAGAAGA |
| 963 | PABPC1 | 3146811 | GTTATAAATATCTAGCTAATCATATTTTGAATCTTATTTTTAATA |
| | | | ATTCCAAATCCATTCATTTTAAGTTAATATTTGTCAGGGAGAAG |
| | | | TTAGATGCACATAAGATAAAAGAATAAAAACATTTTAAAGATGA |
| | | | ATAACAAAAATTCATGTAGTTGTACTGGAGTGAAAATTAATAAG |
| | | | CTAATCTTGATTTTTACAATTGAATTTTCTACACAGTAAGTGTAA |
| | | | CATACA |
| 964 | PABPC1 | 3146812 | TGAAAATGGTTCCAAGGGCTATGGATTTGTACACTTTGAGACG |
| | | | CAGGAAGCAGCTGA |
| 965 | PABPC1 | 3146813 | GCTACATTTAGTTTAGTGCTTGAAATAGGAACTGTGCAGTAAT |
| | | | GGATATCTTTATTTCACAAATATCCAGGTTAGATGGCTAACAGA |
| | | | TTGTCTCTCAACA |
| 966 | PABPC1 | 3146815 | GGAGCGTGCTTTGGACACCATGAATTTTG |
| 967 | PABPC1 | 3146816 | TTTAGGAAATGGACTAGTTTTCATATAATATTGTTAGTTATTAGC |
| | | | AATGAAATGACCAATTTTAGCAAGTAGTTGGGAAGAAGTTAAA |
| | | | ATATTTAAATCTATAAACTACTTCCAGCTTGTAGATAAATCTGTT |
| | | | GCGTAATGTC |
| 968 | PABPC1 | 3146817 | AGGCAGGATGTATCAATGCATGTCAGATGGGGGTAGATAACTT |
| | | | TGGGGCAGGTTATCACAACCTAAGAGTTGGTGGAGAAAACAT |
| | | | GGGAATGAATTCTAGAGACCACAAAATGAAAACTTGAAAGTGT |
| | | | TACTCTTTCTCAGCTTAACGTTTTTAAATCCAAAAAACAATTTTT |
| | | | ACATTTCTTGGGATTCGAAGAGTTGAACTTCAGGTTGCCGTGG |
| | | | TTACAGTGTACAGTATATATTATCAGTCTGTACCAGTAGACCAG |
| | | | TACCCTAACTACTGAAAAGAATATGGCAGTTTTCCATTTGTCTA |
| | | | GTTTCTGTATGTACAATTTACTATCCAATTAATTACTTAAGTGGA |
| | | | TTTCTTGTTCTTTTTTAAAAACTTATTGCTACATTGATAGGCAGA |
| | | | ATAGCTTCTGAAAGTGACCAGTTTTCAATTTCATAGGAAGAGG |
| | | | TGACTCATTGAAAAATAGCTCAAGCAAAGTCAGCTAAAAAAAA |
| | | | AAAAAAACTAGGGAAGCTGAGTAGGTGTGGTCAATTGATAATG |
| | | | AGCTAACAGCTGATTATCACTATATTCTAGAAACTGGAACTTTC |
| | | | ATTTATAAAAAAAGAGGTGGCCGGAAAATTCATCCTGTC |
| 969 | PABPC1 | 3146818 | TGTGGCAGCCGACCACTTTGAAGGCCAGTTTTCTCAGGCAACT |
| | | | TAGACCATTTTTAGTCAAATTTTATCTTAGATTCACAGTACTGG |
| | | | TGGTTTTCGAGTATATTATGTTACCTTCTGAAATAGTTCCTGTC |
| | | | GTTTTGAGGGGCTTTTCTTTATAAAATAGTCAACTTTGGCTATA |
| | | | AAATGTTACTTTAGTGTAATTCCAACTGGACCAGTCTTATCTGT |
| | | | AGCATGCAAGAAGTTCAAGTTTCTCTTTTATTTTTAAAAGTGGC |
| | | | CCATGATACCTGTAAATC |
| 970 | PABPC1 | 3146819 | CTACGAGAAGTTCAGCCCGGCCGGGCCCATCCTCTCCATCCG |
| | | | GGTCTGCAGGGACATGATCACCCGCCGCTCCTTGGGCTACGC |
| | | | GTATGTGAACTTCCAGCAGC |
| 971 | PABPC1 | 3146820 | GTCGCGGCCTGTGGCCCTGCGGGCAGC |
| 972 | PABPC1 | 3146821 | CCCGGCACTCGCTCTCCTCCTCTCACGGAAAG |
| 973 | PABPC1 | 3146822 | GATTTTTGTCCCTCTGCGCTTGCTCCCCGCTCCCCT |
| 974 | PABPC1 | 3146823 | TCGCTCCCCGCCGGCAGCCGGCAGCCAGCGGCAGTGGATCG |
| | | | ACCCC |
| 975 | PABPC1 | 3146824 | CCAAGAAGGAACCAAGAGACCGAGGCCTTCCCGCTGCCCGG |
| | | | ACCCGACACCGCCACC |
| 976 | PABPC1 | 3146825 | GCTGGCTCCATCTACGCACGTTTCGGAAACCGGGCCCGGAGG |
| | | | GGACCACGCCCGCTCACCCGTGCCCGGCGTCCCCCGGAGCT |
| | | | GGGGCTAGAGGAGCCGGGCCGGCCGCAGCGGGAAGAGGCC |
| | | | ACAGGCGGCCGCGCACGTGGGGGGTGGTTAGCGCGGAGGA |
| | | | ACCCGGAAGCCCTTTGCACCGCCCACCGCCGCGGTGACGGG |
| | | | TTAACGCTCCTCCTGGTGGAGGCAGGGGCGGGCGGGGCGGA |
| | | | AGGCGGGGACGCCTCAGCCAACACCCCCGAGGACCGCCCGC |
| | | | GAGCCGTCCTCCCCACCCCCACGGACGCGACGCAGCGCGGG |
| | | | CTCCGCTTCCCCGGCCGCGGCGCCTGCGCAAAAGCCCCGCC |
| | | | CCTTCGCCCGAGCCCCACCCCCACACCGCAGCCTCCACCGC |
| | | | CGCCACCTCTCCCTTCCTCTCTGCTCTTTCCTCCTGTTTTCTCT |
| | | | TCCCTCCTCCCCCTGGCCTCCGCGTCTCCTCCTACTCCGGCG |
| | | | CTGACGCTCGCGTAGGGGCCCTGGCGTCAGACGCGCGGGGG |
| | | | CGGGGCGAGTGCGGCGCGGGGTATAAGTAGAGGGTGCAGGA |
| | | | GGCGGTGCTTCCCCTTCTCCCCGGCGGTTAGTGCTGAGAGTG |
| | | | CGGAGTGTGTGCTCCGGGCTCGGAACACACATTTATT |
| 977 | PABPC1 | 3146826 | AGGCACCGCTTCTGCGGCCGACGCGCGTGGCGGCGGTGCCG |
| | | | GCTGGGACTCGTAGTGCGGTCCGG |
| 978 | PGM5P4- | 3159288 | ACTATGTTGTGAGCCTGCGAAAGAAGTTTGTGTG |
| | AS1 | | |
| 979 | PGM5P4- | 3159289 | ATGGAAAACTGGGAGCCGCCTTGGAATCTACAGGGCCGG |
| | AS1 | | |
| 980 | PGM5P4- | 3159291 | CGACCTCGACGGCCGTCCTGCCGAAGAACCTGCCGTCGCTG |
| | AS1 | | CCCGCCCCCGTGGTGCGGCCCTGACGGTCGCGCAGGCCGAC |
| | | | GGACGACAGCGCGCTCCGGATGAAGTTGGGCGGGTAGCT |
| 981 | PGM5P4- | 3159293 | AGCCTCCTCCAAAACAGCACACTTTCCG |
| | AS1 | | |
| 982 | PGM5P4- | 3159294 | TGGTTACAATGGTACTTTCAGCCTGTCCGAATTATGTATTGCC |
| | AS1 | | CCTCCCCTTTTTATTAATAACATTGAAGTGTGATGGGACAACCA |
| | | | CTGAAGCCGTCAGTTGAAACCTGCTGGGACTTTTTAGCCATTC |
| | | | TCTTCAACATAAAGAATGGGTGTTTTTGGAGGGGGTGAGAGG |
| | | | AATGGGGAAATGTTGTCAAAGAGTACAACGTTTTAGTTGAGAC |
| | | | AGGAAGAATATATTTTGTTGAGATCTACAGCACAGCATG |
| 983 | PGM5P4- | 3159295 | GCCTACCTAAAATATTGAATGCTGTTAATAAATCTCCTGAGGC |
| | AS1 | | CAGCATAAGAAGGTGATGGGCAAAACTAAT |
| 984 | PGM5P4- | 3159296 | TTGTGTATCTGCGTTCCTTTCAACAAGTGTGACTTCCTCCATG |
| | AS1 | | GCATCATTCGTGAGCGTAACACAGAGCTCAGC |
| 985 | PGM5P4- | 3159297 | GCTCTGAGAGGCTCTTCCTAATAGAACTGCTGCTTCAGTTTAG |
| | AS1 | | CTTGAAAAAGCCCACACCCAGTTCCTAATGACAAACATCTGAA |
| | | | CACCGGGTCTTCCCACGAGCAAGACCATGCTATGCCTCCTGC |
| | | | TCGCTCTGTTCTATAAGCAACCCACAGATTGCTCCCTGTGAAG |
| | | | A |
| 986 | PGM5P4- | 3159298 | AGTAAATCCATTTGCTGATTGCAATA |
| | AS1 | | |
| 987 | PGM5P4- | 3173158 | ACTATGTTGTGAGCCTGCGAAAGAAGTTTGTGTG |
| | AS1 | | |
| 988 | PGM5P4- | 3173159 | TGGTTACAATGGTACTTTCAGCCTGTCCGAATTATGTATTGCC |
| | AS1 | | CCTCCCCTTTTTATTAATAACATTGAAGTGTGATGGGAAAACCA |
| | | | CTGAAGCCGTCAGTTGAAACCTGCTGGGACTTTTTAGCCATTC |
| | | | TCTTCAACATAAAGAATGGGTGTTTTTGGAGGGGGTGAGAGG |
| | | | AATGGGGAAATGTTGTCAAAGAGTACAGTGTTTTAGTTGAGAC |
| | | | AGGAAGAATATATTTTGTTGAGATCTACAGCACAGCATG |
| 989 | RP11- | 3175548 | CCTCAATGGGAACCCTGGTGCAGAA |
| | 159H20.3 | | |
| 990 | RP11- | 3175571 | GTGCGGGGTGGTGGCACTGTCAGCAGGGACCACTGGGAAGT |
| | 159H20.3 | | TGAGGATGAGGACATCAAAAATAAC |
| 991 | RP11- | 3175573 | AAAGGTTACCAGTTCACCAACTGTGCTTTACGGTGAAAAACA |
| | 159H20.3 | | |
| 992 | RP11- | 3175574 | CCACCATGACAGATGACCTGGCAGGTTATG |
| | 159H20.3 | | |
| 993 | SETP14 | 3190668 | AGAACAGCAAGAAGCGATTGAACACATTGATGA |
| 994 | 5ETP14 | 3190670 | ATATAACAAACTCCGCCAACCATTTTTTCAGAAGAGGTCAGAA |
| | | | TTGATCGCCAAAATCCCAAATTTTTG |
| 995 | SETP14 | 3190675 | AGTGGTGATCCATCTTCGAAGTCCACCGAAATCAAATGGA |
| 996 | 5ETP14 | 3190678 | AGAGAGCTTCTTTACCTGGTTTACTGACCATTCTGATGCAGGT |
| | | | GCTGATGAGTTAGGAGAGGTCATCAAAGATGATATTTGGCCAA |
| | | | ACCCATTACAGTACTACT |
| 997 | PGM5P4- | 3208467 | GGGAGCAGCATTCCACCAGACCCTGATTTAGCAAGATATTTCC |
| | AS1 | | GTATCATTCCCCCAACCAGCTGGAA |
| 998 | PGM5P4- | 3208469 | CCAGACGTACAGAGGCTGGGAGCCATTGTGGTGTGCTATATT |
| | AS1 | | GATGACGGCAGCAGTGGG |
| 999 | PGM5P4- | 3208471 | TTGTGTATCTGCGTTCCTTTCAACAAGTGTGACTTCCTCAATGG |
| | AS1 | | CATCATTCGTGAGCGTAACACAGAGCTCAGC |
| 1000 | PGM5P4- | 3208473 | CTTAGAGGGCCCCACAGTTGTTTGCTG |
| | AS1 | | |
| 1001 | PGM5P4- | 3208475 | TGGTTACAATGGTACTTTCAGCCTGTCCGAATTATGTATTGCC |
| | AS1 | | CCTCCCCTTTTTATTAATAACATTGAAGTGTGATGGGACAACCA |
| | | | CTGAAGCCGTCTGTTGAAACCTGCTGGGACTTTTTAGCCATTC |
| | | | TCTTCAACATAAAGAATGGGTGTTTTTGGAGGGGGTGAGAGG |
| | | | AATGGGGAAATGTTGTCAAAGAGTACAATGTTTTAGTTGAGAC |
| | | | AGGAGGAATATATTTTGTTGAGATCTACAGCACAGCATG |
| 1002 | PGM5P4- | 3208476 | AGCCTCCTCCAAAACAGCACACTTTCCG |
| | AS1 | | |
| 1003 | PGM5P4- | 3208477 | AAAAATGAGCAGGTGCGGGATGTGCGCAGAGTCGGAGAAGA |
| | AS1 | | GTCCAGGGCGCCCGGAGTGGCTCCAGGAACGACGGAAAC |
| 1004 | PGM5P4- | 3208478 | ACTATGTTGTGAGCCTGCGAAAGAAGTTTGTGTG |
| | AS1 | | |
| 1005 | ASPN | 3214846 | TCATGTCTTAGAGCCCGTCTTTATGTTTAAAACTAATTTCTTAAA |
| | | | ATAAAGCCTTCAGTAAATGTTCATTACCAACTTGATAAATGCTA |
| | | | CTCATAAGAGCTGGTTTGGGGCTATAGCATATGCTTTTTTTTTT |
| | | | TTAATTATTACCTGATTTAAAAATCTCTGTAAAAACGTGTAGTGT |
| | | | TTCATAAAATCTGTAACTCGCATTTTAATGATCCGCTATTATAA |
| | | | GCTTTTAATAGCATGAAAATTGTTAGGCTATATAACATTGCCAC |
| | | | TTCAACTCTAAGGAATATTTTTGAGATATCCCTTTGGAAGACCT |
| | | | TGCTTGGAAGAGCCTGGACACTAACAATTCTACACCAAATTGT |
| | | | CTCTTCAAATACGTATGGACTGGATAACTCTGAGAA |
| 1006 | ASPN | 3214847 | CTAATTCAATTGCAAGAGTGGGAGTAAATGACTTCTGTCCAAC |
| | | | AGTGCCAAAGATGAAGAAATCTTTATACAGTGCAATAAGTTTAT |
| | | | TCAACAACCCGGTGAAATACTGGGAAATGCAACCTGCAACATT |
| | | | TCGTTGTGTTTTGAGCAGAATGAGCGTTCAGCTTGGGAAC |
| 1007 | ASPN | 3214848 | TGACAACTCTTAACTGGCTGGAAGGGGCCACAGATTCCTTGG |
| | | | AGAATCTAATAAAGATTTAGATCTTCCCAAGAACAAAAGTTTTC |
| | | | ATCTTCCAAGGAGCTTGAGAACAAAACTGGGCAACAAGCCACT |
| | | | CTGCCTCTTCTCTTTTTCTTTCCGGTGTATCTTTAAACAAGTTT |
| | | | CGTTCACTGTACTCCTTTGAGATACAAACCATCAAAATGAATGT |
| | | | AATATAGGCAGGTGCTAATCTCAAGATCACAACTTTTGCTTTGA |
| | | | CTTTTCCAAATGCTGCATTTGGATGTCTGTTTAGCCAGTGACTA |
| | | | CAACTTGAGTCCGTCCTCTCTCAAGCTGCCCCATCCCTGATGT |
| | | | CATTTCTGCTTAATTTGCTCCACAACTCTGCTTCCAGCTTCTGG |
| | | | TCTCTCTTAAATC |
| 1008 | ASPN | 3214849 | ACATTCTACTTGTGTTCAGTAGATATTGGTATTTTTCTTCAGTTT |
| | | | TTATAACACACTTTAGCACACCTCAAGCAAAGACCAAGTAAGC |
| | | | AGCAAGGGTGATTCAAACATAATGACTCTCCAGGTTGCATGAG |
| | | | GTG |
| 1009 | ASPN | 3214850 | ATCACAGATATCGAAAATGGGAGTCTTGCTAACATACCACGTG |
| | | | TGAGAGAAATACATTTGGAAAACAATAAACTAAAAAAAATCCCT |
| | | | TCAGGATTACCAGAGTTGAAATACCTCCAG |
| 1010 | ASPN | 3214851 | TAGGACAGGCTTATATTCTAACTAGTTTGCGGTGTTTTCAGCTA |
| | | | ACTCTATCACACCTAACCATCTGTGTAAGACTTGATGCATT |
| 1011 | ASPN | 3214852 | GCTTACCACCAACTTTATTGGAGCTTCACTTAGATTATAATAAA |
| | | | ATTTCAACAGTGGAACTTGAGGAT |
| 1012 | ASPN | 3214853 | GATAAATGATATCACATGGAAGCTGTCAGCCAAATCCACAAAA |
| | | | GGAGTGTCTCAAACAAATTAATATGGAAATAAATCAAAAGAAG |
| | | | AGGGAGAAAAAAGGAGGGAGTATGTTGTACATTAAGAGAGATT |
| | | | TCAAGAGCGATAAGAACCAAATGTATTCTGTAAACTTCATTTAA |
| | | | TCCTAACTTGAACAAATCAACTGTAAAATGACGTATTTGAGA |
| 1013 | ASPN | 3214854 | CCGGTACAAAAGTGTGCTAACATTTGTCAGCAGTTACTGAGCT |
| | | | TCTGCCAAATTCACACCTCTGCTCGTTTTATCCTAGAGGCTAC |
| | | | ACTTCAATCTTCTCTCTGGTTACCCACCTTCCCCATTTCCTAAG |
| | | | GGACACAACAGTTCCCTCAACTTCTACAAGTCCTCTCCCAGAG |
| | | | ATTA |
| 1014 | ASPN | 3214855 | CCCAGGCATTTAGCCACAGTTTGAGGTGAAGCCTATGAGCCC |
| | | | AGACTGGGCAGCCCCTGGCTCTGGCAGGAATGGACATGCCAT |
| | | | TCAAGGCAAGGCATTTTGTACCCAGCTTCTTCCCAGGTGTACT |
| | | | GTGAAGACTAATGGGCCAATACACAGAAAGGTCTGAGGACAA |
| | | | CATCCAGCACGTAGGAAGTGACCACCTGTGACATAATCATTAC |
| | | | CAAGATGAGCACTGTGCTCTTTATCATGGCTTTGTGTGACCCA |
| | | | AGGCTAGCACCTCAAGTAGAATGCTCCTTAAGTCTGCCAGATG |
| | | | ACCAGTGTTCTAACCCATTACTTCCAAGCTCCCTGTCTGATGA |
| | | | TTAGCTGCATA |
| 1015 | ASPN | 3214856 | TAATAATGGGATAGAGCCAGGGGCATTTGAAGGGGTGACGGT |
| | | | GTTCCATATCAGAATTGCAGAAGCAAAACTGACCTCAGTTCCT |
| | | | A |
| 1016 | ASPN | 3214857 | CCTGAACAACAACAAGCTAACGAAGATTCACCCAAAAGCCTTT |
| | | | CTAACCACAAAGAAGTTGCGAAGGCTGTATCTGTCCCACAATC |
| | | | AACTAAGTGAAATACCACTTAATCTTCCCAAATCATTAGCAGAA |
| | | | CTC |
| 1017 | ASPN | 3214858 | AATACTGGTAAATCAAATCCACTTCC |
| 1018 | ASPN | 3214859 | ATTCCATTTGATACTCGAATGCTTGATC |
| 1019 | ASPN | 3214860 | ATGGGTCTTAAGCTTTACCTGTGGAATTCTCATGAGAAAGAGA |
| | | | TTAAGATGCAAGTACTGTTTGAGAAAACTTGTTCATGTAGAAC |
| | | | GACTGTGGA |
| 1020 | ASPN | 3214861 | TGCTATTCTGACAATTTAAAGGATGGAAAAAGTCTCATTGAAAT |
| | | | TTCAAAAATAATCTGAGTGTATAAGTTTTTTTCATTTAAGTTTTT |
| | | | AGGTGGAAAGTACAGCAAACCCCAAAGTACATCCAAACTTATT |
| | | | TTTAAAATTAAGAAAATCAAAGGAAAACTAAGGGAATGTTGTCC |
| | | | ATAGAACATTTCCTTCTCTTCCCCAGTTAAATCAAAGCATTTAA |
| | | | TTTTAATTCCCTTCAGAGAGAATGGACATCACATGCAGTTCTAT |
| | | | CTCAGGGTGCTAGCAGGTTGAGACTGTACTTTTCAGTAAAACT |
| | | | CCATGATAACAAAATAAGCTGCATGTCTAGAACAATGAAATGA |
| | | | GTTATAGAAAGCTTGTGAAATCTCTAATCTA |
| 1021 | ASPN | 3214862 | TTTGATCTGTTTCCAATGTGTCCATTTGGATGTCAGTGCTATTC |
| | | | ACGAGTTGTACATTGC |
| 1022 | ASPN | 3214863 | TGTGCTCCTATTATTCCTGGCTTTGTGCTCTGCCAAACCCTTCT |
| | | | TTAGCCCTTCACACATCGCACTGAAGAATATGATGCTGAAGGA |
| | | | TATGG |
| 1023 | ASPN | 3214864 | TCCTAGACTGGTCTTCTACACTAAGACACC |
| 1024 | ASPN | 3214865 | GAAGTTTGGGGATATCACAGCTATATTAAATGAAACAGTAAATA |
| | | | TATTTTTCAATATTTAAAATATTTTCTAATGTGTATTTAAAATGTG |
| | | | TGAATTACTGAAATGTCAATTTTACTTATACATTTGAATATTCAT |
| | | | TTTTTTCCTTGATAAATGTCTTCCTTATTATAATGAAATGGCACT |
| | | | GAAAAGTTCAAATGGAAATCTATTCAATTCCAAGAAAGAATACT |
| | | | TATCAGCAATAGTTTAGCTAGCACTATATTCAATATGAAAGATT |
| | | | AGGAAATTTTCACAGCATGTATACAGTCAGAATTTAACACTTTC |
| | | | AAAGATTTCCTTTGTCTACTCCCAAAGTAAATTTCTGATTAAATT |
| | | | TTAGATTAAAAAATTTAAGCAATGTATTCAATATTCTACTCCCTA |
| | | | GTAATCTAAATAGCGCACAGCATTCTTTCATGTTAATCTATTCA |
| | | | GAGGTGTGGCACCCAGGAAACA |
| 1025 | ASPN | 3214866 | TGGACTAATCTGTGGGAGCAGTTTATTCCAGTATCACCCAGGG |
| | | | TGCAGCCACACCAGGACTGTGTTGAAGGGTGTTTTTTTTCTTT |
| | | | TAAATGTAATACCTCCTCATCTTTTCTTCTTACACAGTGTCTGA |
| | | | GAACATTTACATTATAGATAAGTAGTACATGGTGGATAACTTCT |
| | | | ACTTTTAGGAGGACTACTCTCTTC |
| 1026 | ARL6IP1P2 | 3242825 | GGAAACGCCTCTTCACACTAAAGGAAGAA |
| 1027 | ARL6IP1P2 | 3242826 | TGACTTCCTTACTATTGCTTCCTGGACTAA |
| 1028 | MKI67 | 3312496 | ACTCGTGAGCACATCTTTAGGGACCAAGAGTGACTTTCTGTAA |
| | | | GGAGTGACTCGTGGCTTGCCTTGGTCTCTTGGGAATACTTTTC |
| | | | TAACTAGGGTTGCTCTCACCTGAGACATTCTCCACCCGCGGAA |
| | | | TCTCAGGGTCCCAGGCTGTGGGCCATCACGACCTCAAACTGG |
| | | | CTCCTAATCTCCAGCTTTCCTGTCATTGAAAGCTTCGGAAGTTT |
| | | | ACTGGCTCTGCTCCCGCCTGTTTTCTTTCTGACTCTATCTGGC |
| | | | AGCCCGATGCCACCCAGTACAGGAAGTGACACCAGTACTCTG |
| | | | TAAAGCATCATCATCCTTGGAGAGACTGAGCACTCAGCACCTT |
| | | | CAGCCACGATTTCAGGATCGCTTCCTTGTGAGCCGCTGCCTC |
| | | | CGAAATCTCCTTTGAAGCCCAGACATCTTTCTCCAGCTTCAGA |
| | | | CTTGTAGATATAACTCGTTCATCTTCATTTACTTTCCACTTTGC |
| | | | CCCCTGTCCTCTCTGTGTTCCCCAAATCAGAGAATAGCCCGCC |
| | | | ATCCCCCAGGTCACCTGTCTGGATTCCTCCCCATTCACCCACC |
| | | | TTGCCAGGTGCAGGTGAGGATGGTGCACCAGACAGGGTAGCT |
| | | | GTCCCCCAAAATGTGCCCTGTGCGGGCAGTGCCCTGTCTCCA |
| | | | CGTTTGTTTCCCCAGTGTCTGGCGGGGAGCCAGGTGACATCA |
| | | | TAAATACTTGCTGAATGAATGCAGAAATCAGCGGTACTGACTT |
| | | | GTACTATATTGGCTGCCATGATAGGGTTCTCACAGCGTCATCC |
| | | | ATGATCGTAAGGGAGAATGACATTCTGCTTGAGGGAGGGAAT |
| | | | AGAAAGGGGCAGGGAGGGGACATCTGAGGGCTTCACAGGGC |
| | | | TGCAAAGGGTACAGGGATTGCACCAGGGCAGAACAGGGGAG |
| | | | GGTGTTCAAGGAAGAGTGGCTCTTAGCAGAGGCACTTTGGAA |
| | | | GGTGTGAGGCATAAATGCTTCCTTCTACGTAGGCCAACCTCAA |
| | | | AACTTTCAGTAGGAATGTTGCTATGATCAAGTTGTTCTAACACT |
| | | | TTAGACTTAGTAGTAATTATGAACCTCACATAGAAAAATTTCAT |
| | | | CCAGCCATATGCCTGTGGAGTGGAATATTCTGTTTAGTAGAAA |
| | | | AATCCTTTAGAGTTCAGCTCTAACCAGAAATCTTGCTGAAGTAT |
| | | | GTCAGCACCTTTTCTCACCCTGGTAAGTACAGTATTTCAAGAG |
| | | | CACGCTAAGGGTGGTTTTCATTTTACAGGGCTGTTGATGATGG |
| | | | GTTAAAAATGTTCATTTAAGGGCTACCCCCGTGTTTAATAGATG |
| | | | AACACCACTTCTACACAACCCTCCTTGGTACTGGGGGAGGGA |
| | | | GAGATCTGACAAATACTGCCCATTCCCCTAGGCTGACTGGATT |
| | | | TGAGAACA |
| 1029 | MKI67 | 3312497 | ATGAGCGCACGGATGAATGGAGCTTACAAGATCTGTCTTTCCA |
| | | | ATGGCCGGGGGCATTTGGTCCCCAAATTAAGGCTATTGGACA |
| | | | TCTGCACAGGACAGTCCTATTTTTGATGTC |
| 1030 | MKI67 | 3312498 | AGGAACAACTATCCTCGTCTGTCCCAACACTGAGCAGGCACT |
| | | | CGGTAAAC |
| 1031 | MKI67 | 3312499 | ATTTGCTGGGTCTGAATCGGCTTCATAAACTCCACTGGGAGCA |
| | | | CTGCTGGGCTCCTGGACTGAGAATAGTTGAACACCGGGGGCT |
| | | | TTGTGAAGGAGTCTGGGCCAAGGTTTGCCCTCAGCTTTGCAG |
| | | | AATGAAGCCTTGAGGTCTGTCACCACCCACAGCCACCCTACA |
| | | | GCAGCCTTAACTGTGACACTTGCCACACTGTGTCGTCGTTTGT |
| | | | TTGCCTATGTCCTCC |
| 1032 | MKI67 | 3312500 | GGACAATGTGTGTGTCAAGAAAATAAGAACCAGAAGTCATAGG |
| | | | GACAGTGAAGATATTTG |
| 1033 | MKI67 | 3312501 | GTTCAGCAAACGAAACTCATGTAGCAATAACCTCTTCAGATAC |
| | | | AGAATTCTGGCAAGTACAGCTGTCCAGACAGACCCTCTTCGG |
| | | | CACAAACTAGGAAGCTTCAACTG |
| 1034 | MKI67 | 3312502 | CAGAAGAGTGCGAAGGTTCTCATGCAGAATCAGAAAGGGAAA |
| | | | GGAGAAGCAGGAAATTCAGACTCCATGTGCCTGAGATCAAGA |
| | | | AAGACAAAAAGCCAGCCTGCAGCAAGCACTTTGGAGAGCAAA |
| | | | TCTGTGCAGAGAGTAACGCGGAGTGTCAA |
| 1035 | MKI67 | 3312503 | GAGCCCGGAAACCCATACCTAGAGACAAAG |
| 1036 | MKI67 | 3312504 | TATCCCTGCGCTCCAGACGCCAAAAT |
| 1037 | MKI67 | 3312505 | GAGCAAAGTACCAAGGCATTACCTTGA |
| 1038 | MKI67 | 3312506 | AAGAGGCTGCGCTGCATGCCAGCACCAGAGGAAATTGTGGAG |
| | | | GAGCTGCCAGCCAGCAAGAAGCAGAGGGTTGCTCCCAGGGC |
| | | | AAGAGGCAAATCATCCGAACCCGTGGTCATCATGAAGAGAAG |
| | | | TTTGAGGACTTCTGCAAAAAGAATTGAACCTGCGGAAGAGCTG |
| | | | AACAGCAACGACATGAAAACCAACAAAGAGGAACACAAATTAC |
| | | | AAGACTCGGTCCCTG |
| 1039 | MKI67 | 3312507 | CCCGTGCTCTAGAAGACCTGGTTGACTTCAAAGAGCTCTTCTC |
| | | | AGCACCAGGTCACACTGAAGAGTCAATGACTATTGACAAAAAC |
| | | | ACAAAAATTCCCTGCAAATCTCCCCCACCAGAACTAACAGACA |
| | | | CTGCCACGAGCACAAAGAGATGCCCCAAGACACGTCCCAGGA |
| | | | AAGAAGTAAAAGAGGAGCTCTCAGCAGTTGAGAGGCTCACGC |
| | | | AAACATCAGGGCAAAGCACACACACACACAAAGAACCAGCAA |
| | | | GCGGTGATGAGGGCATCAAAGTATTGAAGCAACGTGCAAAGA |
| | | | AGAAACCAAACCCAGTAGAAGAGGAACCCAGCAGGAGAAGGC |
| | | | CAAGAGCACCTAAGGAAAAGGCCCAACCCCTGGAAGACCTGG |
| | | | CCGGCTTCACAGAGCTCTCTGAAACATCAGGTCACACTCAGG |
| | | | AATCACTGACTGCTGGCAAAGCCACTAAAATACCCTGCGAATC |
| | | | TCCCCCACTAGAAGTGGTAGACACCACAGCAAGCACAAAGAG |
| | | | GCATCTCAGGACACGTGTGCAGAAGGTACAAGTAAAAGAAGA |
| | | | GCCTTCAGCAGTCAAGTTCACACAAACATCAGGGGAAACCAC |
| | | | GGATGCAGACAAAGAACCAGCAGGTGAAGATAAAGGCATCAA |
| | | | AGCATTGAAGGAATCTGCAAAACAGACACCGGCTCCAGCAGC |
| | | | AAGTGTAACTGGCAGCAGGAGACGGCCAAGAGCACCCAGGG |
| | | | AAAGTGCCCAAGCCATAGAAGACCTAGCTGGCTTCAAAGACC |
| | | | CAGCAGCAGGTCACACTGAAGAATCAATGACTGATGACAAAAC |
| | | | CACTAAAATACCCTGCAAATCATCACCAGAACTAGAAGACACC |
| | | | GCAACAAGCTCAAAGAGACGGCCCAGGACACGTGCCCAGAAA |
| | | | GTAGAAGTGAAGGAGGAGCTGTTAGCAGTTGGCAAGCTCACA |
| | | | CAAACCTCAGGGGAGACCACGCACACCGACAAAGAGCCGGTA |
| | | | GGTGAGGGCAAAGGCACGAAAGCATTTAAGCAACCTGCAAAG |
| | | | CGGAAGCTGGACGCAGAAGATGTAATTGGCAGCAGGAGACAG |
| | | | CCAAGAGCACCTAAGGAAAAGGCCCAACCCCTGGAAGATCTG |
| | | | GCCAGCTTCCAAGAGCTCTCTCAAACACCAGGCCACACTGAG |
| | | | GAACTGGCAAATGGTGCTGCTGATAGCTTTACAAGCGCTCCAA |
| | | | AGCAAACACCTGACAGTGGAAAACCTCTAAAAATATCCAGAAG |
| | | | AGTTCTTCGGGCCCCTAAAGTAGAACCCGTGGGAGACGTGGT |
| | | | AAGCACCAGAGACCCTGTA |
| 1040 | MKI67 | 3312508 | GGAGAACTCTTAGCGTGCAGGAATCTAATGCCATCAGCAGGC |
| | | | AAAGCCATGCACACGCCTAAACCATCAGTAGGTGAAGAGAAA |
| | | | GACATCATCATATTTGTGGGAACTCCAGTGCAGAAACTGGACC |
| | | | TGACAGAGAACTTAACCGGCAGCAAGAGACGGCCACAAACTC |
| | | | CTAAGGAAGAGGCCCAGGCTCTGGAAGACCTGACTGGCTTTA |
| | | | AAGAGCTCTTCCAGACCCCTGGTCATACTGAAGAAGCAGTGG |
| | | | CTGCTGGCAAAACTACTAAAATGCCCTGCGAATCTTCTCCACC |
| | | | AGAATCAGCAGACACCCCAACAAGCACAAGAAGGCAGCCCAA |
| | | | GACACCTTTGGAGAAAAGGGACGTACAGAAGGAGCTCTCAGC |
| | | | CCTGAAGAAGCTCACACAGACATCAGGGGAAACCACACACAC |
| | | | AGATAAAGTACCAGGAGGTGAGGATAAAAGCATCAACGCGTTT |
| | | | AGGGAAACTGCAAAACAGAAACTGGACCCAGCAGCAAGTGTA |
| | | | ACTGGTAGCAAGAGGCACCCAAAAACTAAGGAAAAGGCCCAA |
| | | | CCCCTAGAAGACCTGGCTGGCTTGAAAGAGCTCTTCCAGACA |
| | | | CCAGTATGCACTGACAAGCCCACGACTCACGAGAAAACTACC |
| | | | AAAATAGCCTGCAGATCACAACCAGACCCAGTGGACACACCA |
| | | | ACAAGCTCCAAGCCACAGTCCAAGAGAAGTCTCAGGAAAGTG |
| | | | GACGTAGAAGAAGAATTCTTCGCACTCAGGAAACGAACACCAT |
| | | | CAGCAGGCAAAGCCATGCACACACCCAAACCAGCAGTAAGTG |
| | | | GTGAGAAAAACATCTACGCATTTATGGGAACTCCAGTGCAGAA |
| | | | ACTGGACCTGACAGAGAACTTAACTGGCAGCAAGAGACGGCT |
| | | | ACAAACTCCTAAGGAAAAGGCCCAGGCTCTAGAAGACCTGGC |
| | | | TGGCTTTAAAGAGCTCTTCCAGACACGAGGTCACACTGAGGA |
| | | | ATCAATGACTAACGATAAAACTGCCAAAGTAGCCTGCAAATCT |
| | | | TCACAACCAGACCCAGACAAAAACCCAGCAAGCTCCAAGCGA |
| | | | CGGCTCAAGACATCCCTGGGGAAAGTGGGCGTGAAAGAAGA |
| | | | GCTCCTAGCAGTTGGCAAGCTCACACAGACATCAGGAGAGAC |
| | | | TACACACACACACACAGAGCCAACAGGAGATGGTAAGAGCAT |
| | | | GAAAGCATTTATGGAGTCTCCAAAGCAGATCTTAGACTCAGCA |
| | | | GCAAGTCTAACTGGCAGCAAGAGGCAGCTGAGAACTCCTAAG |
| | | | GGAAAGTCTGAAGTCCCTGAAGACCTGGCCGGCTTCATCGAG |
| | | | CTCTTCCAGACACCAAGTCACACTAAGGAATCAATGACTAACG |
| | | | AAAAAACTACCAAAGTATCCTACAGAGCTTCACAGCCAGACCT |
| | | | AGTGGACACCCCAACAAGCTCCAAGCCACAGCCCAAGAGAAG |
| | | | TCTCAGGAAAGCAGACACTGAAGAAGAATTTTTAGCATTTAGG |
| | | | AAACAAACGCCATCAGCAGGCAAAGCCATGCACACACCCAAA |
| | | | CCAGCAGTAGGTGAAGAGAAAGACATCAACACGTTTTTGGGA |
| | | | ACTCCAGTGCAGAAACTGGACCAGCCAGGAAATTTACCTGGC |
| | | | AGCAATAGACGGCTACAAACTCGTAAGGAAAAGGCCCAGGCT |
| | | | CTAGAAGAACTGACTGGCTTCAGAGAGCTTTTCCAGACACCAT |
| | | | GCACTGATAACCCCACGACTGATGAGAAAACTACCAAAAAAAT |
| | | | ACTCTGCAAATCTCCGCAATCAGACCCAGCGGACACCCCAAC |
| | | | AAACACAAAGCAACGGCCCAAGAGAAGCCTCAAGAAAGCAGA |
| | | | CGTAGAGGAAGAATTTTTAGCATTCAGGAAACTAACACCATCA |
| | | | GCAGGCAAAGCCATGCACACGCCTAAAGCAGCAGTAGGTGAA |
| | | | GAGAAAGACATCAACACATTTGTGGGGACTCCAGTGGAGAAA |
| | | | CTGGACCTGCTAGGAAATTTACCTGGCAGCAAGAGACGGCCA |
| | | | CAAACTCCTAAAGAAAAGGCCAAGGCTCTAGAAGATCTGGCT |
| | | | GGCTTCAAAGAGCTCTTCCAGACACCAGGTCACACTGAGGAA |
| | | | TCAATGACCGATGACAAAATCACAGAAGTATCCTGCAAATCTC |
| | | | CACAACCAGACCCAGTCAAAACCCCAACAAGCTCCAAGCAAC |
| | | | GACTCAAGATATCCTTGGGGAAAGTAGGTGTGAAAGAAGAGG |
| | | | TCCTACCAGTCGGCAAGCTCACACAGACGTCAGGGAAGACCA |
| | | | CACAGACACACAGAGAGACAGCAGGAGATGGAAAGAGCATCA |
| | | | AAGCGTTTAAGGAATCTGCAAAGCAGATGCTGGACCCAGCAA |
| | | | ACTATGGAACTGGGATGGAGAGGTGGCCAAGAACACCTAAGG |
| | | | AAGAGGCCCAATCACTAGAAGACCTGGCCGGCTTCAAAGAGC |
| | | | TCTTCCAGACACCAGACCACACTGAGGAATCAACAACTGATGA |
| | | | CAAAACTACCAAAATAGCCTGCAAATCTCCACCACCAGAATCA |
| | | | ATGGACACTCCAACAAGCACAAGGAGGCGGCCCAAAACACCT |
| | | | TTGGGGAAAAGGGATATAGTGGAAGAGCTCTCAGCCCTGAAG |
| | | | CAGCTCACACAGACCACACACACAGACAAAGTACCAGGAGAT |
| | | | GAGGATAAAGGCATCAACGTGTTCAGGGAAACTGCAAAACAG |
| | | | AAACTGGACCCAGCAGCAAGTGTAACTGGTAGCAAGAGGCAG |
| | | | CCAAGAACTCCTAAGGGAAAAGCCCAACCCCTAGAAGACTTG |
| | | | GCTGGCTTGAAAGAGCTCTTCCAGACACCAATATGCACTGACA |
| | | | AGCCCACGACTCATGAGAAAACTACCAAAATAGCCTGCAGATC |
| | | | TCCACAACCAGACCCAGTGGGTACCCCAACAATCTTCAAGCC |
| | | | ACAGTCCAAGAGAAGTCTCAGGAAAGCAGACGTAGAGGAAGA |
| | | | ATCCTTAGCACTCAGGAAACGAACACCATCAGTAGGGAAAGCT |
| | | | ATGGACACACCCAAACCAGCAGGAGGTGATGAGAAAGACATG |
| | | | AAAGCATTTATGGGAACTCCAGTGCAGAAATTGGACCTGCCAG |
| | | | GAAATTTACCTGGCAGCAAAAGATGGCCACAAACTCCTAAGGA |
| | | | AAAGGCCCAGGCTCTAGAAGACCTGGCTGGCTTCAAAGAGCT |
| | | | CTTCCAGACACCAGGCACTGACAAGCCCACGACTGATGAGAA |
| | | | AACTACCAAAATAGCCTGCAAATCTCCACAACCAGACCCAGTG |
| | | | GACACCCCAGCAAGCACAAAGCAACGGCCCAAGAGAAACCTC |
| | | | AGGAAAGCAGACGTAGAGGAAGAATTTTTAGCACTCAGGAAA |
| | | | CGAACACCATCAGCAGGCAAAGCCATGGACACACCAAAACCA |
| | | | GCAGTAAGTGATGAGAAAAATATCAACACATTTGTGGAAACTC |
| | | | CAGTGCAGAAACTGGACCTGCTAGGAAATTTACCTGGCAGCA |
| | | | AGAGACAGCCACAGACTCCTAAGGAAAAGGCTGAGGCTCTAG |
| | | | AGGACCTGGTTGGCTTCAAAGAA |
| 1041 | MKI67 | 3312509 | AACAACAGTTGAAGGCATCCCTGGGGAAAGTAGGTGTGAAAG |
| | | | AAGAGCTCCTAGCAGTCGGCAAGTTCACACGGACGTCAGGGG |
| | | | AGACCACGCACACGCACAGAGAGCCAGCAGGAGATGGCAAG |
| | | | AGCATCAGAACGTTTAAGGAGTCTCCAAAGCAGATCCTGGAC |
| | | | CCAGCAGCCCGTGTAACTGGAATGAAGAAGTGGCCAAGAACG |
| | | | CCTAAGGAAGAGGCCCAGTCACTAGAAGACCTGGCTGGCTTC |
| | | | AAAGAGCTCTTCCAGACACCAGGTCCCTCTGAGGAATCAATGA |
| | | | CTGATGAGAAAACTACCAAAATAGCCTGCAAATCTCCACCACC |
| | | | AGAATCAGTGGACACTCCAACAAGCACAAAGCAATGGCCTAA |
| | | | GAGAAGTCTC |
| 1042 | MKI67 | 3312510 | TGCAAACAGGTCAGGAAGGTCTACAGAGTTCAGGAATATACA |
| | | | GAAGCTACCTGTGGAAAGTAAGAGTGAAGAAACAAATACAGAA |
| | | | ATTGTTGAGTGCATCCTAAAAAGAGGTCAGAAGGCAACACTAC |
| | | | TACAACAAAGGAGAGAAGGAGAGATGAAGGAAATAGAAAGAC |
| | | | CTTTTGAGACATATAAGGAAAATATTGAATTAAAAGAAAACGAT |
| | | | GAAAAGATGAAAGCAATGAAGAGATCAAGAACTTGGGGGCAG |
| | | | AAATGTGCACCAATGTCTGACCTGACAGACCTCAAGAGCTTGC |
| | | | CTGATACAGAACTCATGAAAGACACGGCACGTGGC |
| 1043 | MKI67 | 3312511 | CCCAGTGAAGGAGCAACCGCAGTTGACAAGCACATGTCACAT |
| | | | CGCTATTTCAAATTCAGAGA |
| 1044 | MKI67 | 3312512 | TGGCCTCTAGATCCTAGCAGGGAGGCCTATGGGTCTCAGGAG |
| | | | CCCGTCACCAGCCTCCGTGCTCCAGAGCTCACGTGTGGGGTC |
| | | | TTGTTAGGAGGACCCAGA |
| 1045 | MKI67 | 3312513 | TAAAAACGTAGTCTTAGATCTTATAAATCTTTTGACTCTACTGTT |
| | | | TTTTACTGTGTTAATGTTTGTTTTGCTAACTTTGTTTATCTGCTG |
| 1046 | MKI67 | 3312514 | CGCAAACTCTCCTTGTACCATAATAATAGGGAAAGCTCATACT |
| | | | GAAAAAGTACATGTGCCTGCTCGACCCTACAGAGTGCTCAA |
| 1047 | MKI67 | 3312515 | AGCCTGTGGGCGAAGTTCACAGTCAA |
| 1048 | MKI67 | 3312516 | CATGGGCAGATGTAGTAAAACTTGGTGCAAAACAAACACAAAC |
| | | | TAAAGTCATAAAACATGGTCCTCAAAGGTC |
| 1049 | MKI67 | 3312517 | AAGAGAGTGTCTATCAGCCGAAGTCAACATGATATTTTACAGA |
| | | | TGATATGTTCCAAAAGAAGAAGTGGTGCTTCGGAAGCAAAT |
| 1050 | MKI67 | 3312518 | AAACAAGAGTCAGGTTCAGAAATCCATGTGGAAGTGAAGGCA |
| | | | CAAAGCTTGGTTATAAGCCCTCCAGCTCCTAGTCCTAGGAAAA |
| | | | CTCCAGTTGCCAGTGATCAACGCCGTAGGTC |
| 1051 | MKI67 | 3312519 | CCTTTGAAAAGAAGGCGTGTGTCCTTTGGTGGGCACCTAAGA |
| | | | CCTGAACTATTTGATGAAAACTTGCCTCCTAATACGCCTCTCAA |
| | | | AAGGGGAGAAGCCCCAACCAAAAGAAAGTCTCTGGTAATGCA |
| | | | CACTCC |
| 1052 | MKI67 | 3312520 | GGACAGATGTGCTCTGGGTTACCTGGTCTTAGTTCAGTTGATA |
| | | | TCAACAACTTTGGTGATTCCATT |
| 1053 | MKI67 | 3312521 | TTGAGAGGAAGATCCAAAAGGATTCCCTCAG |
| 1054 | MKI67 | 3312522 | GAAGCTTTCAACTAGAAATCGAACACCAGCTAAAGTTGAAGAT |
| | | | GCAGCTGACTCTGCCACTAAGCCAGAAAATCTCTCTTCCAAAA |
| | | | CCAGAGGAAGTATTCCTACAGATGTGGAAGTTCTGCCTACGG |
| | | | AAACTGAAATTCACAATGAGC |
| 1055 | MKI67 | 3312523 | CCAGCGTTAAATTAGTGAGCCGTTATGGAGAATTGAAGTCTGT |
| | | | TCCCACTACACAATGTCTTGACAATAGCAAAAAAAATGAATCTC |
| | | | CCTTTTGGAAGCTTTATGAGTCAGTGAAGAAAGAGTTGGATGT |
| | | | AAAATCACAAAAAGAAAATGTCCTACAGTATTGTAGAAAATCTG |
| | | | GATTACAAACTGATTACGCAACAGAGAAAGAAAGTGCTGATGG |
| | | | TTTACAGGGGGAGACCCAACTGTTGGTCTCGCGTAAGTCAAG |
| | | | ACCAAAATCTGGTGGGAGCGGCCACGCTGTGGCAGAGCCTG |
| | | | CTTCACCTGAACAAGAGCTTGACCAGAACAAGGGGAAGGGAA |
| | | | GAGACGTGGAGTCTGTTCAGACTCCCAGCAAGGCTGTGGGCG |
| | | | CCAGCTTTCCTCTCTATGAGCCGGCTAAAATG |
| 1056 | MKI67 | 3312524 | AGCCAGCACGTCGTGTCTCAAGATCTAGCTTCT |
| 1057 | MKI67 | 3312525 | GGCTCTCAGATCCACCCTAAGTATCCACCAGCCAAGAGGGCG |
| | | | CACATGCCAAGTGGAGCCTCAGTTCATCGACAGGTCCTATGG |
| | | | CCCATTTATGAGAAAACTGATGACGCAGTCAGTAGTTCTGA |
| 1058 | MKI67 | 3312526 | TTCAGAATGGAAGGAAGTCAACTGAATTTC |
| 1059 | MKI67 | 3312527 | CCAACACAAGTAAATGGGTCTGTTATTGATGAGCCTGTACGGC |
| | | | TAAAACATGGAGATGTAATAACTATTATTGATCGTTCCTTCAG |
| 1060 | MKI67 | 3312528 | TGTGACATCCGTATCCAGCTTCCTGTTGTGTCAAAACAACATT |
| 1061 | MKI67 | 3312529 | GGCTCCTTGTGGCAATAGGAAAATGGGACAGAAAGTCTTCCT |
| | | | GCCTGGAATTCGAGAACGTTTCCTCTTATATTGCTGTCCTGTTT |
| | | | GGTGG |
| 1062 | MKI67 | 3312530 | CCTGAGCCTCAGCACCTGCTTGTTTGGAAG |
| 1063 | MKI67 | 3312531 | CCCACGAGACGCCTGGTTACTATCAA |
| 1064 | MKI67 | 3312532 | TTTGCTTCTGGCCTTCCCCTACGGATTATACCTGGCCTTCCCC |
| | | | TACGGATTATACTCAACTTACTGTTTAGA |
| 1065 | MKI67 | 3312533 | GACTCGGTGGGAGCCGCTAGAGCCGGGCGCCCGGGGACGTA |
| | | | GCCTGTAGGGCCACCGGGTCCCCGTCAGAGGCGGCGGCGG |
| | | | GAGCAGCGGGGACTGCAGGCCGGGGTGCAGCGAACGCGAC |
| | | | CCCGCGGGCTGCGGCCCGGTGTGTGCGGAGCGTGGCGGGC |
| | | | GCAGCTTACCGGGCGGAGGTGAGCGCGGCGCCGGCTCCTCC |
| | | | TGCGGCGGACTTTGGGTGCGACTTGACGAGCGGTGGTTCGAC |
| | | | AAGTGGCCTTGCGGGCCGGAT |
| 1066 | GLYATL1P3 | 3331888 | ATGGCTCTCTGTTTCACATCAATCACGGGAACCCCTTCAACAT |
| | | | GGAAGTGTTGGTGGACTCCTGGCCCGAGTATCAGATGGTTAT |
| | | | TATCCGACCTC |
| 1067 | GLYATL1P3 | 3331891 | TGCGTTACATCAAGCGCTGCCTAGGAGCCCTGCCAGCAGCCT |
| | | | GTATGCTGGGCCCAGAGGGGGTCCCGGTCTCATGGGTAACCA |
| | | | TGGACCCTTCTTGTGAAATAGGAATGGGCTACAGTGTGGAAAA |
| | | | ATACCGAAGGAGAGGCAATGGGACACGGCTGATCATGCGATG |
| | | | CATGAAGTATCTGTGTCAGAAGAATATTCCATTTTACGGCTCTG |
| | | | TGCTGGAAGAAAATCAAGGCGTCATCAGAAAGACTAGTGCACT |
| | | | AGGTTTCCTTGAGGCCTCC |
| 1068 | GLB1L3 | 3357343 | ATGGACGATCTAGGAAACTTTCAGGGAGCTAAGGTGTCGGAG |
| | | | AGCAAAGTATCCTT |
| 1069 | GLB1L3 | 3357345 | GTCCCGCTACTTCGTCACCAAAGCGCCCGCCGCGCTCGCATC |
| | | | TGCTGTGAGGCTGTGCTCGGGCCGCTCCCGCCGAGGGAACG |
| | | | GCCCTCCCAAGGCTCTGCGCCCCAATTCTCGCTCGTTTGCCA |
| | | | AGA |
| 1070 | GLB1L3 | 3357347 | TGTCGACCCAGGTTAGGAAGCCCGAGGTCGGGGCGTTACCC |
| | | | CAAGGGCCCTCCCGCTTCCCCTCCGAGGGCAGAGAGGCGTC |
| | | | CGCGCCCGGACGCACTGCGGGAACACCTGGAGCGCCGGCG |
| | | | GAGCTCGGCTGTCCCCGCGGGAGGGAGCCCGACGCGCATCC |
| | | | TTGGGACCCGGACCCGGCGCCCGCGCCTCGGGACGGATTTC |
| | | | TGCCTCGGCTGCAGGCGCAGCGCGCAGACCTGAGCCT |
| 1071 | GLB1L3 | 3357348 | CCTGGAAGAGAATGGCGGGCATCTTTTTCCTGCCATTTATCTC |
| | | | ATCAGGTTTTGCTCCTCGGTTTAAGCAGGAAGAGAACTTCATG |
| | | | CTTGGAAGAGCGCATCCG |
| 1072 | GLB1L3 | 3357349 | GCTGAAGAATCGATCTGTGGGACTTGGAACTGAAAGCACAGG |
| | | | TCGGGGTAAGCCCCACTTCACACTGGAGGGCCACAAGTTCCT |
| | | | GATCTTCGGGGGCTCCATCCACTATTTCCGGGTGCCCAGGGA |
| | | | GTACTGGAGGGACCGCCTGCTGAAGCTGAAGGCCTGTGGCTT |
| | | | CAATACTGTCAC |
| 1073 | GLB1L3 | 3357350 | ATGTTCCGTGGAACCTGCATGAGCCAGAAAGAGGCAAATTTG |
| | | | ACTTCTCTGGGAACCTGGACCTGG |
| 1074 | GLB1L3 | 3357351 | GCTACTGGGGGTGGATTAGCAACCAAA |
| 1075 | GLB1L3 | 3357352 | CCCGATGGGGCTGTGCAGAGGCTCTGAGGCTGGGAGCAGCT |
| | | | CAGGCCACCGACCTG |
| 1076 | GLB1L3 | 3357353 | CCTCATCCTGGGCCGTCGTGGGAGGGGCTGACGATGTGGAC |
| | | | CTCCCTAG |
| 1077 | GLB1L3 | 3357354 | CCTTCGTCCTGATGGCCGCAGAGATCGGGCTGTGGGTGATTC |
| | | | TGCGTCCAGGCCGCTACATCTGCAGTGAGATGGACCTCGGGG |
| | | | GCTTGCCC |
| 1078 | GLB1L3 | 3357355 | CTGGCTCCTGCAAGACCCCCGGTTACTGTTGAGGACAACCAA |
| | | | CAAGAGCTTCATTGAAGCAGTTGAGA |
| 1079 | GLB1L3 | 3357356 | GCGCCCAACAGCATTGCCTTTTTTATGGTGTACCCAGACCTCA |
| | | | TGCACTTGATAAGAAACGCCTTCATTTTTACCATGGCAACCTA |
| | | | GAGCACACAGTCA |
| 1080 | GLB1L3 | 3357357 | AGAAGCACAAATGCCGTTCACAGGCACATGTATGCAACGAGG |
| | | | AAAGCTAATTTACAGGCATCCCATTGAACTGTGGGAAATGCTA |
| | | | GGAAACTTTT |
| 1081 | GLB1L3 | 3357358 | TAAGTGAAATGTAATGCCCCATACCTCGCATACCTTGCACTAA |
| | | | TTT |
| 1082 | GLB1L3 | 3357359 | TCATCGCGGTGCAAGTGGAGAATGAGTATGGCTCATTCA |
| 1083 | GLB1L3 | 3357360 | AGAAGAGGGATTGTGGAGCTTCTCTTGACCTCTGATG |
| 1084 | GLB1L3 | 3357361 | GTGAGAAACATGTGCTGAGTGGCCACAC |
| 1085 | GLB1L3 | 3357362 | AGCCAGCCCGTGTAAATCTTGAACACACTGCAGAGAAAACCAA |
| | | | GTGCATCTCGATACCTCCCTTTCCCGTGTCCACTGGGATGGAT |
| | | | CCTGGAGTTCGATGTTACAATAAATGAGGACTCAAGGTTAAGG |
| | | | CTCAGGGCCACTCACAGCTCCCTATCTTGGCCTTGCTCCTGC |
| | | | CGTCTTTAAACACAGCAGCACTGGAGCTCCTCTGTTCTCAGGA |
| | | | CGCCTTTCCATCTCCCATAGTTTTTCTGTGGCAAGAAATCTGC |
| | | | ATTGGTGCTGCGCCTGGCTTGGGATCAGGGCCATCTCCACTA |
| | | | ACTTGGGAAA |
| 1086 | GLB1L3 | 3357363 | TGTTGGCCGCCATCAATTTGCAAAAACTTCACCAGGATACTTT |
| | | | CAATCAGCTTCATA |
| 1087 | GLB1L3 | 3357364 | CTGGTATTCCGTGAAAACAGGTTTGACAAGAAGACCGCAGGTT |
| | | | TTCACC |
| 1088 | GLB1L3 | 3357365 | GGAGGAGGGAACCCTGCTTGTGTCACCTCCGCTTGTGGATCA |
| | | | CGTCATGGAGATGAGTGGG |
| 1089 | GLB1L3 | 3357366 | ATACTGTCTTGGAGATCAGCCTGCCTTTCATTCTGCTAGGCCA |
| | | | TGTGGGATTTTGTGTTCCCCTCGTCTGGAGTTAGGCTGGTTGT |
| | | | GGGGTTTGTTGTTGCTGTGTTATCCTTTGTGCATCATGGGCTT |
| | | | CAAATGTTTCTGGTGGTACCTTGTGTCAAGGGCAAGTGCTGGT |
| | | | TTGGCAGAGGTTGTTTTCTCTGTGTCTGCATTCCCCTCTGAGT |
| | | | CTCGCCTTTGCATTGAGTCCCACAGAGAATCTGTTGCTTGCGG |
| | | | ATCTCTCAGCTATAGTATG |
| 1090 | GLB1L3 | 3357367 | CTCTCAGATGCCTCACAAGCAGCAAC |
| 1091 | GLB1L3 | 3357368 | CCATAATTTTGTCCTTCTAAGCTTCTGATGCACTGAATTATGTA |
| | | | AAGTGCATTCCCTTCACCAGCTTGTGCACCCTATTCTGTAACT |
| | | | GATA |
| 1092 | GLB1L3 | 3357369 | CCTTCTGATTATGGAATACTGGGTCGGCTGGTTCGACAGATGG |
| | | | GGAGATAAGCACCATGTTAAAGATG |
| 1093 | GLB1L3 | 3357370 | ACATGCTGTGTCTGAATTCATCAAATATGAGATCTCCT |
| 1094 | GLB1L3 | 3357371 | CTTTGGTTTCATGAACGGGGCCACATATTTCGGGAAGCACTCG |
| | | | GGCATTGTCAC |
| 1095 | GLB1L3 | 3357372 | GTCGCTGGTGTAGTAGCCTCTCCAGC |
| 1096 | GLB1L3 | 3357373 | GAGGCTCCGGAAGCCTGTTCTGGCACCACTGGGTTCTTGA |
| 1097 | GLB1L3 | 3357374 | CCCAACAGGCTGTCATTGCAGTAGACAGGGCTTTCCGGGACT |
| | | | TAGAGCTCCGCTTCACACATCTGGTATACTGCCCTGTTGGCTT |
| | | | GAACCTCTGAAGAGAGGCAGGGTAGGAACGGTGACTGCTGTA |
| | | | AAGGCACAGACCTGCACGGCCGGGCGATACAGACTGAGCAA |
| | | | AGAAAAGAGTACCCGTTGAAGGGGTGTCCACTCTTTTGGCTTC |
| | | | CCTGGGCCACACTGGAAGAAGAAGAATTGTCTTGGGCCACAC |
| | | | ATGAAATACACTAACACTAATGATAGCTGATGAGCTTAAAAAAA |
| | | | AAACACAAAATGTTTTAAGAAAGTTTATGAATTTGTGTTGGGCT |
| | | | GCATTCAAAGCCATCCTGGGCCGCCTGTAGCCCATGAGCTGT |
| | | | GGGTTGAACAAGTTTGCATTAGAAAGTGAAGAAGTGGGGGCA |
| | | | AGCCCAGTGTCATGGCTTGACACTGGAAGCCAGTGGAAGGTG |
| | | | CCCAGGAAGAGTTGTGGGGAATGTCCTTAGACTGGCATC |
| 1098 | GLB1L3 | 3357375 | GCAGTGCTCACGGAGGCTGGAGATTACACA |
| 1099 | GLB1L3 | 3357376 | GTACTCAGCACCCATTTAACTTACGGGCCAGCCCTCCTCAT |
| 1100 | GLB1L3 | 3357377 | TGTGGGCAGCAGTTACACCAAGCTCCTGAGAACAAGGGCAAC |
| | | | CTTAACTTCGAACCCTGGGGTTAAAATCTGTGTGATTTTTTAAA |
| | | | ATCAGGGTTTCTAAGCATTTTATAAGCCTCAGTTTCTTCACTGA |
| | | | AGCATAAAGATAGTAACCTTGGTCTCCTGTGATGACTGCGAAG |
| | | | ATTGAGTTACTCTTTGTAAAGCTCTTATACCATGGATGACATAG |
| | | | TA |
| 1101 | GLB1L3 | 3357378 | AAGGCTGTGTATCCCCCCGTGAGACCGTCGCTGTACCTCCCG |
| | | | CTGTGGGACGCCCTATCCTACTTAA |
| 1102 | GLB1L3 | 3357379 | GACTGTGTGGTCCTTACGGAATCCACGTAGGAAAAGCTGCTG |
| | | | AGCTGGAATCGGGAGACTAGCTTCTGCCCGTGCTTCACCAGC |
| | | | AGCTGGGCCTGAACTTCCTGGGTCACTGCTCCCCCTTTTCCAT |
| | | | CAGCCTTCCTGTCCTATTTTGAAGAAAGGTGAAAGCTGTTTGG |
| | | | AACTGAAACTGTAGCCCTTGGATTCACATTGGTTTTACCTCTG |
| | | | CTATCACTATTTTAGAGAAAAGGTAGTGACTGGTACACTAAAG |
| | | | AAACTACATTTATTTAATGTAACTAAATTTAATTTAATGAAATAA |
| | | | ACATTTGCTTGGTGCCTCATTCATTGCTAGACTTCAACTATTTT |
| | | | AGAATACAATTTATTTACTCTTTTTTTTTCTTGAGACAGGGTCTT |
| | | | GCTTGGTGGCTGTGGCTGGAATGCGGTGGCACAATCATGGCT |
| | | | CACTGCAGCCTTGAACTCCTGGGCTGAAGCAATCCTCCGGCC |
| | | | TCAGCCTCTTGAGTAGCTGGGATTACAGGAGGGCACCACCAC |
| | | | GCCCAGCTACATTTTTAAGTTTTTTGTAGATGTGGGTCTCACTA |
| | | | TGTTGCCCAGGCTGCTCTCAAACTCCTGGCCTCAAGTGATGCA |
| | | | CCTGCTGCGGCCTCCCAAAGTGCTGGGATTACAGGCGTGAGC |
| | | | CCCTGCGCCCCATCCATTTCCTCTGTTAATCAGTTCTTAGGATT |
| | | | ATAACGATTGCTCCCTCATCACCATGCCCTGCATTTCCCTGAG |
| | | | TTTCCTTCCTGGGCAGTGGAGACGTAAGCACAGAGCAGTGTC |
| | | | ACATGGCATCTGTTTC |
| 1103 | GLB1L3 | 3357380 | CCAGTCAGGTCGCGTCAGCCCGTCAAC |
| 1104 | GLB1L3 | 3357381 | GCGGCCAGTCCTACGGGCTTGTCCTGTATGAGAAGTCCATCT |
| | | | GCTCCGGAGGCCGCCTCCGTGCCCACGCTCATGACGTGGCA |
| | | | CA |
| 1105 | GLB1L3 | 3357382 | GTTTTTGGATGAGACAATGATAGGGATTCTGAATGAGAATAAT |
| | | | AAGGACCTGCACATTCCTGAACTCA |
| 1106 | GLB1L3 | 3357383 | CCTGGTGGAGAATCAAGGACGAGTCAATTTTTCATGGCAAATA |
| | | | CAGA |
| 1107 | GLB1L3 | 3357384 | TGTCAGCATCAATAACTCTTCCCTGGAGGGCTTTACCATCTATT |
| | | | CCCTG |
| 1108 | GLB1L3 | 3357385 | CAGGGCCCGGCCTTCTACTGTGGGA |
| 1109 | GLB1L3 | 3357386 | TTATGGATTTGTGTTCATCAATGGACGTAACCTTGGGCGATATT |
| | | | GGAATATTGGGCCTCAGAAAACACTGTACCTTCCTGGAGTTTG |
| | | | GCTTCATCCAGAAGACAATGAG |
| 1110 | GLB1L3 | 3357387 | AAGATGATGAGTGGCTCAGATATCAAATCTACAG |
| 1111 | GLB1L3 | 3357388 | CCACTCCCGGCCGTGAACATATTTTTTGGGTTGCTGGAGTTCA |
| | | | TCTATAAGTCATTTTTGAGGAATAAGATTTATGTTAAGACTATC |
| | | | AAACACAGTGTTGCCTACAATAGCAAAAATGTGAAAATAACAA |
| | | | CAACAACAAAACAGCAGAGGAATTGTTATGTATTTTGTAGTCTA |
| | | | TCTATATGATGCCTATTTTTAGGCTTTAAAAAGTCTTCAAAATCT |
| | | | TTAATGACTGATTTATCTAGTTAAATGCTTAATCCTTAGCAGGC |
| | | | TCTTATTCTTTAATTAAACGTGCCTTTGAGTAGATGTG |
| 1112 | GLB1L3 | 3357392 | GGTCACCGAAGCTTCTCTGAAAATGTGACATCTCTGAGGAAG |
| | | | GTGGAACATTAATCATCTCTAGCAGTGCATAGGCCCTCTCTAT |
| | | | GGCATTGTCAACTAAGCACTAATAATAGTCAGGGGACAACATG |
| | | | CAGCGATAGCCAAGAGCATGGATCTTGGAGCCAAAGAGATCA |
| | | | GGTTTTAATCTCAGCTCTGCAGCGCTAGCCATGCGCTAGCTTC |
| | | | ATGCAGGCTTCCTTCA |
| 1113 | GLB1L3 | 3357393 | CCACTATCACCACCATCACCATCAA |
| 1114 | GLB1L3 | 3357395 | TGAGATCTCATAAACTTTCAGATCAAAAT |
| 1115 | GLB1L2 | 3357398 | AGCCGCGAGCCCCAGCCAATGAGCGCCGGCGGGCCGGTTGC |
| | | | CCAGGCGACCAGTGCGCGGCTCCGCCCCCCGCGGCGAGGCT |
| | | | CCCGCGCGCGGCTGAGTGCGGACTGGAGTGGGAACCCGGGT |
| | | | CCCCGCGCTTAGAGAACACG |
| 1116 | GLB1L2 | 3357399 | CACGTGGAGCCTCCGGCGGAGGCCGGCCCGCACGCTGGGA |
| | | | CTCCTGCTGCTGGTCGTCTTGGGCTTCCTGGT |
| 1117 | GLB1L2 | 3357400 | CCCTCCAGCCGTCAGAGCCCTCTCAGACGCACCCCATCGCGG |
| | | | CCCCGTCCCCACTGCTCCGCGGAGAGCTC |
| 1118 | GLB1L2 | 3357401 | CCTCTGGGAGGCGCCTTATTCCGCAG |
| 1119 | GLB1L2 | 3357402 | TGACCCTATCTTTCAGGTCAGCACTTTCCATATTCAAAACCTCC |
| | | | AGTGGGAAGCCGACCGGCAGTATCGAATGAACTGA |
| 1120 | GLB1L2 | 3357403 | CAGGTAGAACAGAAGCTCAAGGAGCTCTGA |
| 1121 | GLB1L2 | 3357404 | CGGCGGTCATCGTACTCCGGATGTTCACGGCACTCCGGATGT |
| | | | TCTGCTGTGCCCGGTTGCATGGATCCTGGCCTATCTGTGTCTG |
| | | | GTCATACTCTGCATGGCA |
| 1122 | GLB1L2 | 3357405 | TGCCGAGAGGCGCTTTCTCGCGGACCGGAGCCTTCGACGGC |
| | | | C |
| 1123 | GLB1L2 | 3357406 | TGAAGACCTGGAATCGGGTGGATGGGTGGACGCCGCCAACG |
| | | | CAGAC |
| 1124 | GLB1L2 | 3357407 | TCTCTGCTCCTGCGGTCGGGCGGCTGCGACCGTGCCGGGGC |
| | | | TCGGAGGTACCGTGTGAAGTCGCTGTCGCGCGTGGCCGC |
| 1125 | GLB1L2 | 3357408 | CCTCCATGCCGAGTGCTGTGCTTGCTGCCGGCTGCAGCCTC |
| 1126 | GLB1L2 | 3357409 | GGCGGAGGGGAGCTTTTCCCAGCCACCTGGACGCAGGCGCC |
| | | | CTCGAGAGAGAAATGCCGAGGACCTGCGAAGGGGCGAGGAA |
| | | | GCCGATCTCTCTGCGGCCCGGAG |
| 1127 | GLB1L2 | 3357410 | TCCCTCTGCGGCTCCGCCATCGACAGCTGGGGCTGCAGGCC |
| | | | AAGGGCTGGAACTTCATGCTGGAGGATTCCACCTTCTGGATCT |
| | | | TCGGGGGCTCCATCCACTATTTCCGTGTGCCCAGGGAGTACT |
| | | | GGAGGGACCGCCTGCTGAAGATGAAGGCCTGTGGCTTGAACA |
| | | | CCCTCACCA |
| 1128 | GLB1L3 | 3357411 | ATGTTCCGTGGAACCTGCATGAGCCAGAAAGAGGCAAATTTG |
| | | | ACTTCTCTGGGAACCTGGACCTGG |
| 1129 | GLB1L2 | 3357412 | CACCGACCTGGTGTGGGAGTCCCCG |
| 1130 | GLB1L3 | 3357413 | CCTCATCCTGGGCCGTCGTGGGAGGGGCTGACGATGTGGAC |
| | | | CTCCCTAG |
| 1131 | GLB1L3 | 3357414 | CCTTCGTCCTGATGGCCGCAGAGATCGGGCTGTGGGTGATTC |
| | | | TGCGTCCAGGCCCCTACATCTGCAGTGAGATGGACCTCGGGG |
| | | | GCTTGCCC |
| 1132 | GLB1L2 | 3357415 | GGCAAAAAGCTCACAGACATAGGTCTGGTTTGTTTCTGTGTTC |
| | | | CAGTTCCCATTCTGTACTGAATTGTGTTCCAGTTCCCATTCTGT |
| | | | ACTGAATTTCCTTTTCAGGAAAAGCAGCACCCAGAGGGGATC |
| | | | GCTTTCAGTGATGCTGCAGTGAGTGCCCTCACGTAGCCATGC |
| | | | ATG |
| 1133 | GLB1L2 | 3357416 | GGGGCATAGCTTCTGTCTCCACTACCCAGGGCCACTTCTCAG |
| | | | GCACTGATCCATCCAGCC |
| 1134 | GLB1L2 | 3357417 | CCTGACCCTGTTTAGGACTTCCAGACCAGGGCAAGAGGAGCC |
| | | | TCAGAGCCTTTTGTTAGAAAATATGTGTCTTCTCAGAACCTGAA |
| | | | GTGAGAAGGAAGAGCCCTGACTCCAGCTTTGGAACCAATCCA |
| | | | CGCTGCTGTGTTCCTCTGGGGAGTTTGGGATCATAGCAACAG |
| | | | GGTGGAGGGAGAATTCAACTCTTGCTCACCTGCTGCTCTGGG |
| | | | CTGTGCGCCACTGATGCCAAGGCGTTAGCCACGTTGGCAAGG |
| | | | ATGGGGACTGCCTCCTGCTCAGCCCCTCGCAGTCTCTGTCAG |
| | | | GCTTGTTTTTTGGGGTGACGCTAGAAGGTTGTGTCTCCTCCTT |
| | | | CCACAGCCTCAGTGATTCCTAACCCTTTTGACTTCACTTTTTGA |
| | | | AATGGGATCACAGAGCAAGTTGTTGAAAACTAGGCCTGGAGT |
| | | | CCTGTGAAAAGCTTTTC |
| 1135 | GLB1L2 | 3357418 | GGACAACTTACAAGGGCTTCACCGAAGCAGTGGACCTTTATTT |
| | | | TGACCACCTG |
| 1136 | GLB1L2 | 3357419 | ACAAGCGTGGGGGACCTATCATTGCCGTGCAGGTGGAGAATG |
| | | | AATATGGTTCCTATAATAAAGACCCCGCATACATGCCCTACGT |
| | | | CAAGAAG |
| 1137 | GLB1L2 | 3357420 | ACCGTGGCATTGTGGAACTGCTCCTGACTTCAGACAACAAGG |
| | | | ATGGGCTGAGCAAGGGGATTGTCCA |
| 1138 | GLB1L2 | 3357421 | GTAACTGCACTTGTGTTGGGCCGTGGGGGCTGGCGGCGGCC |
| | | | CTGGGCTGGCTGTGCACGCTCCCGCTGTGGG |
| 1139 | GLB1L2 | 3357422 | TGTTCTCAGCATATCAGCCTCCGTGTGCCTCTGAAAATGTCGT |
| | | | CCAGATTACCCTATCCTGCTGAACGCCAGGCATCTCTGTCACA |
| | | | CTCAGAGTGAAGCGCAGGTTCTGGGAATGACCTCGAAAGGCC |
| | | | TCTCCACTTGGCCTCCAGGACCTAGCTGAGCTCACCTCCTGCT |
| | | | CCTTCCCTTTGCTCACACCGTTTCACCCTCTTTACTGTTCCTCC |
| | | | AACATCCAGATCCCCAGCCTGGGGGGCTTTGCTCTTCTTCCA |
| | | | GAGAGCTACATGGCTGTTCTCCGAAGTTAGCGAGGCTTTCTGT |
| | | | AGCACCACACTTG |
| 1140 | GLB1L2 | 3357423 | GTAGTTTATTTATGTCATTCATCTGTTTCACCCAGCAGTACTCT |
| | | | TGGCGGGGCTT |
| 1141 | GLB1L2 | 3357424 | AGCAGCGCCTAGCTGGCACCCAGGGAGTGAAGGTCCATGAAT |
| | | | GGCGAGGAAAAGGCTTTTGTCCCCAGGCAGAGTCAGTCAAGG |
| | | | ACCCAGACCTCGTGTCTCCGGCATGGGGAGGACCAGCAGTG |
| | | | ATCCCCACGGCT |
| 1142 | GLB1L2 | 3357425 | CTCCCGGTTTCAGGCCTTGCAAGGAAGCCCGGGAGCCGCCA |
| | | | CTGCTTTTCCCTGTGGCCCTCCCACCTCCAGGCACCCACCTG |
| | | | CGTGCCCCTGTTGCCACCTGCTGCCCGGAATAACTTCTTTTTT |
| | | | TTTTTTTTAATTAAAAAAATTAAATGGTCTAAAAGTGAAATAATC |
| | | | GAAAATGTTGGTAGAGAAATACAGTGTTGCCTACTCTTCGTTA |
| | | | CATTCTCCAGAAATGACCATTTTCAACTCTTTGACTTTTTCTTTG |
| | | | GATATTTTCCTTCTTATTTCCAAATACTGTGAACATACAGCCCT |
| | | | GCATCGTTTGCTTTAAAAGTTCTGCCTATTGGCCGGGCAGTGG |
| | | | CTCAGGCCTGTCATCCCAGCGCTGTGGGAGGCCGAGGCGGG |
| | | | CGGATCATGAGGTCAGGAGATCGAGACCAGCCTGCCCAACAT |
| | | | GGCGAAACCCTGTCTCTACTGAAAATACAAAAAATTAGCCGGG |
| | | | TGTGGTGGCGGGCACCTGTAGTCCCAGCTACTCGGGAGCTGA |
| | | | GGCAGGAGAATCCGTGAACCCGGGTGGCGGAGTTTGCAGTG |
| | | | AGCCGAGATTGCACCACTGCACTCCAGCCTGGACGACAGAGC |
| | | | AAGACTCCGTCTCAAAAAAAAAACAAAAAACAAAAAACATTATC |
| | | | CGAGCGTGGTGGCGGGTGCCTGTAATCCCAGCTACTTGGGAG |
| | | | GCTGAGGCAGGAGAATTGCTTGAATGTGAGAGGCAGAGGTTG |
| | | | CAGTGAGCCCCGATGGTACCCCTGCACTCTAGCCTGGGTGAC |
| | | | AAGAGCAAAACTCCGTTAAAAAAAAAAATTCTGCCTATTGACTT |
| | | | CTTGTTCCAGTAGGTGATGAGTGTTCTTTCCTGCCAGCATGGC |
| | | | TGTTCAGCCCTGATAGGCGCCAGCGTGGGCCTCGCGGATGTG |
| | | | TATGACAACG |
| 1143 | GLB1L2 | 3357426 | CTGCTTGGCTGCATCCCGCGTGGAATCCTGCTTCCTGGAGTT |
| | | | CCAGGAAACAGGATGTTTCTTGGTGCTCCGTGGCTTCCCG |
| 1144 | GLB1L2 | 3357427 | ACTCCGGCTCCCGAGCGTTTCCTGGGTCTTCTTCCTCCTCGC |
| | | | CCCCGGCCAAGTTCCTCAGGGAGCCCGCCCTCCCCTTCTCGT |
| | | | GCTGCTGCGCATCCGGGGAGCGGCCCAGTTAC |
| 1145 | GLB1L2 | 3357428 | CAGCTCGGGCCCAGGGTTCTCAGGCAGG |
| 1146 | GLB1L2 | 3357429 | TCTTGGCCACCATCAACTTGCAGTCAACACACGAGCTGCAGCT |
| | | | ACTGACCACCTTTCTCTTCAACGTCCAG |
| 1147 | GLB1L2 | 3357430 | CTGCTCAGCGGCCTATGGGAATTCTGAATGCCTGTCAGCGTG |
| | | | CTCAGCTTCCCCAGCGCAGGGAGCTGGACTCAGGGCTGATG |
| | | | GCCTCTGGCCCCCCGCCCATGCCACTGTGTGCCTGCAAGGCC |
| | | | CGCTGCCCAGAAACACCTCTGAGGGCTGCTGTGTAGGCTGAT |
| | | | GCAGTGTGGACATCACCCACTGCCCTGAGAGAGGGGCCCTTT |
| | | | TGGTGCACTCCTAGAGGACTCGACTTTTGTGGCCTCAACTAGC |
| | | | TCCAGACTTGCTCCCAGGGATTGAGGGGGGAAGGAAAAACTT |
| | | | CCCTGTCCTATACTACACAGGCATCCGACCTTAACCTGTGAGG |
| 1148 | GLB1L2 | 3357431 | CTCTGGGCTTCTGCAAACGTGGCAGAGTGGAGCATGGTCCCA |
| | | | GGAATGATCTTGGCCTCCTTGGG |
| 1149 | GLB1L2 | 3357432 | CAGAACCTGCACCATGAATAGCTGTGC |
| 1150 | GLB1L2 | 3357433 | AACTGGTGTGCAGGCGAATTTGGCCCTCACCTATGCCC |
| 1151 | GLB1L2 | 3357434 | ACTGGACGGGGTGGTTTGACTCGTGGGGAGGCCCTCACAATA |
| | | | TCTTGGATTCTTCT |
| 1152 | GLB1L2 | 3357435 | GTTTTGAAAACCGTGTCTGCCATTGTGGACGCCGGCTCCTCCA |
| | | | TCAACCTCTACATGTTCCACGGAGGCACCAACTTTGGCTTCAT |
| | | | GAATGGAGCCATGCACTTC |
| 1153 | GLB1L2 | 3357436 | CTTCGTGTCTTTGGCAATAGAGTACCT |
| 1154 | GLB1L2 | 3357437 | CAGTCATGTTACACTCCCAGAGGAGGGA |
| 1155 | GLB1L2 | 3357438 | ATGCTGTGCTGACAGAAGCCGGCGATTACACGGCCAAGTACA |
| | | | TGAAGCTTCGAGACTTCTTCGGCTCCATCTC |
| 1156 | GLB1L2 | 3357439 | TCTCAGACCCCTAAAGAGTTACTTCCTTACTGTCCCACCTCGA |
| | | | CCCCAGTTGATCTGCGTGCAAGAATATCCTAGACA |
| 1157 | GLB1L2 | 3357440 | ACCTTCTTCCCAAGATGCCGTATGAGCCCTTAACGCCA |
| 1158 | GLB1L2 | 3357441 | CTCTGTGGGACGCCCTCAAGTACCTG |
| 1159 | GLB1L2 | 3357442 | GTGAGTGCTGTGGGCAGTCATCGGGAG |
| 1160 | GLB1L2 | 3357443 | AACCTGCCAGTCAATGGGGGAAATGGACAGTCCTTCGGGTAC |
| | | | ATTCTCTATGAGACCAGCATCACCTCGTCTGGCATCCTCAGTG |
| | | | GCCACGTGCATGATCGG |
| 1161 | GLB1L2 | 3357444 | GTAGGAGCTTCTCTTCTAAATTCCTGTGACCTTCTG |
| 1162 | GLB1L2 | 3357445 | GTGTTTGTGAACACAGTATCCATAGGATTCTTGGACTACAAGA |
| | | | CAACGAAGATTGCTGTCCC |
| 1163 | GLB1L2 | 3357446 | GGTTACACCGTGCTGAGGATCTTGGTGGAGAATCGTGGGCGA |
| | | | GTCAACTATGGGGAGAATATTGATGACCAGCGCAAA |
| 1164 | GLB1L2 | 3357447 | AATCTAGCTAAATGTGGGTGGTTTCA |
| 1165 | GLB1L2 | 3357448 | TTAATTGGAAATCTCTATCTGAATGATTCACCCCTGAAAAACT |
| 1166 | GLB1L2 | 3357449 | CTGGCCCGCACCCAGGTGTGAACGCCTCCAGGGGCCAG |
| 1167 | GLB1L2 | 3357450 | GTTCGGCCTGGACAAATGGAGTTCCCTCCCAGAAA |
| 1168 | GLB1L2 | 3357451 | ATGAACACCCTTCCCCTCTGTTTCAA |
| 1169 | GLB1L2 | 3357452 | TGGCCAGAACCTTGGACGTTACTGGAACATTGGACCCCAGAA |
| | | | GACGCTTTACCTCCCAGG |
| 1170 | GLB1L2 | 3357453 | CCTGTTCCCCATGACGCCCTGCCCACCTGCCGTCCCAGGGAG |
| | | | CCTTCG |
| 1171 | GLB1L2 | 3357454 | GACAGACGTCAGCTGCCCTCCCAGCCGGGCCCTCTCTCCACA |
| 1172 | GLB1L2 | 3357455 | TCATCGTTTTTGAGGAGACGATGGCGGGCCCTGCATTACAGTT |
| | | | CACGGAAACCCCCCACCTGGGCAGGAACCAGTACATTAA |
| 1173 | GLB1L2 | 3357456 | TGCCAGTGGGAGACTGCCGCCTCCTCTTGACCTGAAGCCTGG |
| | | | TGGCTGCTGCCCCACCCCTCACTGCAAAAGCATCTCCTTAAGT |
| | | | AGCAACCTCAGGGACTGGGGGCTACAGTCTGCCC |
| 1174 | GLB1L2 | 3357457 | CCCTGCTCTTGTGCCGAGGCTGTCGGGCTGTCTCTAGGGTGG |
| | | | GAGCAGCTAATCAGATCGCCCAGCCTTTG |
| 1175 | GLB1L2 | 3357458 | AAAAGTGCTGAAACGTGCCCTTGCACTGGACGTCACAGCCCT |
| | | | GCGAGCATCTGCTGGACTCAGGCGTGCTCTTTGCTGGTTCCT |
| | | | GGGAGGCTTGGCCACATCCCTCATGGCCCCATTTTATCCCCG |
| | | | AAATCCTGGGTGTGTCACCAGTGTAGAGGGTGGGGAAGGGGT |
| | | | GTCTCACCTGAGCTGACTTTGTTCTTCCTTCACAACCTTCTGA |
| | | | GCCTTCTTTGGGATTCTGGAAGGAACTCGGCGTGAGAAACAT |
| | | | GTGACTT |
| 1176 | GLB1L2 | 3357459 | GAAATCCTCACCCTGCGTCTTCCCAAGTTAGCAGGTGTCTCTG |
| 1177 | GLB1L2 | 3357460 | GTGAGTCCTGGCAGAAGCCATGGCCCAT |
| 1178 | GLB1L2 | 3357461 | CCCAGCTCACATGTGAGTCCTGGCAGAAGCCATGGCCCATGT |
| | | | CTGCACATCCAGGGAGGA |
| 1179 | GLB1L2 | 3357462 | GTGAGTCCTGGCAGAAGCCATGGCCCAT |
| 1180 | GLB1L2 | 3357463 | TCTGCACATCCAGGGAGGAGGACAGAAGGCCCAGCTCAC |
| 1181 | GLB1L2 | 3357464 | GTGAGTCCTGGCAGAAGCCATGGCCCAT |
| 1182 | GLB1L2 | 3357465 | TCTGCACATCCAGGGAGGAGGACAGAAGGCCCAGCTCACA |
| 1183 | GLB1L2 | 3357466 | AGAGCAGCCCTCCTTCGAAGTGTGTCCAAGTCCGCATTTGAG |
| | | | CCTTGTTCTGGGGCCCAGCCCAACACCTGGCTTGGGCTCACT |
| | | | GTCCTGAGTTGCAGTAAAGCTATAACCTTGA |
| 1184 | GLB1L2 | 3357467 | AGCTGTGTATGAGCTGGTTCCGTCAGAAAGTGATGGAATGGA |
| | | | AGGGAACCTTCCTGCAAATCCTCCTGTAAGGTGGAGAAGCCC |
| | | | CTTGGATCACACTTCCACGCAGACCTG |
| 1185 | GLB1L2 | 3357468 | AGCAGGCTGAGCAACGCTTGTTCCGCCTGGTGGAGAGTTCGT |
| | | | TCTTCTTGGGCCCGGGGAGCTGCATGTCAGGGTGTTGCTGCT |
| | | | TCGCTCAAGGGTCACTTATCACGGAGGCCTCTGTGGTCACCC |
| | | | TACAGAGCACTGAC |
| 1186 | OR51A6P | 3360298 | TGATGTTTTCTTGCTAGTGCCACCTCTTATGAATCCCATTGTAT |
| | | | ATTGTG |
| 1187 | OR51A6P | 3360299 | CTTCTATGCGCCCGTCATTGCTTTGGCAT |
| 1188 | OR51A6P | 3360300 | AAGCTGGCCTGCTCCGACAACACTGTCAACTTCTTCTATGGTT |
| | | | TCTTTCTTGCCCTCTGTATGATGTCAGAAAGTGTGTTCATTACT |
| | | | GTGTCTTATGTGCTCATCCTGAAGACGATCATGGGAATTGGAT |
| | | | CCCATAGGGAGCGGCTCA |
| 1189 | OR51A6P | 3360301 | TGCTGTTAGTACTCCCATTTCCTTTCACTCTTACAAGGTTGACA |
| | | | TATTGTAGGAAAAGCCTACTCTCTCATTCCTATTGTCTCCATCA |
| | | | G |
| 1190 | OR51A6P | 3360302 | TTTTGACCGGTTTTGGCCATATGCCACCCTCTGAGGTACATAT |
| | | | CTGAGGTACTGGTGAGCTGTATCCTCACCAGTGCCAGAGTTG |
| | | | CCAAAATG |
| 1191 | OR51A6P | 3360303 | TGGAGCATGCCCATATATGGATATCTGTCCCCATCTGCCTCAT |
| | | | GTACTTGGTAGCCATCCTAGGCAATTGCACAATCCTCTTTGTT |
| | | | ATCAGGACTGAGCCCTCACTCCATGCACCCATGTACTATTTCC |
| | | | TTTCCATGTTGGCTGTCTCTGATCTGGGCCTGTCCCTCTCCTA |
| | | | CCTACCCACTATGCTGAGGATCTTTGTATTCAATGCCACAGGA |
| | | | ATCTCCTCAAATGCTCGCTTTGCTCAAGAATTCTTTATTCATGG |
| | | | ATTCACAGATATGGAGTCCTCAGTG |
| 1192 | FTH1P2 | 3375656 | AAGCTGCAGAACCAACGAGGTGGCCGAATCTTCCTTCAG |
| 1193 | RP11- | 3377879 | AGGTGCTGGTCATCATTCTGTCCCATTTTTTGCCACTGTGCTA |
| | 770G2.5 | | AGGCTTTTGACTCAACCAAGAAAAGGGCCGGTCTTCCAGCCT |
| | | | GGCCCTGCAAGAGTGTCCTAGTGCTTCAGGTAGTGGATGGGC |
| | | | ATCGTCATTCGTCCCACCTTCCTGCCCCCTAAAGCCCCAGGA |
| | | | GGACACACTCTCAGCATCAGGCCAGCTCTCCGGGTCACTGGG |
| | | | GCTTGGCTCAACAGGATGTGCAGGGCAGAGCCGGGAGGGAA |
| | | | GAGCAGAAGATGCCATGGGCTGTTCGCAGGAGCAGCCGTCC |
| | | | AGGGCGCCGCTGGAGGAAGATCTTCTAGTGGCTGTCTCAGCA |
| | | | CGTACAAAGAA |
| 1194 | RP11- | 3377880 | CAGAGCTTCATGACGGCCTCGGATTGGCAGTCAACCCAGGGA |
| | 770G2.5 | | TACAGAAATGTAAACAAAAACAGAGCTTCCAGATAACATTACT |
| | | | GTGTGCTATGTGACTTTCAGAATACAGCAGCGTCCCAGACACT |
| | | | CTAAAGTCAAGTGAAACAAGAGATTTTAGAATCAATCTATACAC |
| | | | ATTTCAGAGGGCAGTCCAGG |
| 1195 | SESN3 | 3387255 | TCTTCTCTCCAGCTAGGTGCACTTGAGGTTGTTCATAAATGTAA |
| | | | AATTATGTCAGGTTTCTAACATGGGACACTGCACACAGTTGTC |
| | | | TGACCTGATGAACCATCCCATTTGAAAGTATAGATTATTATTAT |
| | | | TTCTTGTAGTATTTGGTTGTTTTCCATCTCATTCATGAACAACT |
| | | | CAACCTGATAGTAGTATCCAATAAATGCCTTTCAGGGCTCAGG |
| | | | AATGAATTGACATCCTAGTTAAGAAATGAGACTTAATAATGGAG |
| | | | ACTGAATGAGGCGGTTTGTATTAAATTATATGCCATGAAGTGTT |
| | | | CATTTTAGCTTTAACCTAATTATGACTGTACCACCATGAAGTAC |
| | | | AGAATGAAAAATTATATATATGGGGGGGAAACAGAATGAATAT |
| | | | CTGATTCTTTTGAATGCTTGTGGAAATCTTTGAGATCGTGCAG |
| | | | GGCATACCACAAAATAGCCTTTAGAACAGATACCCAATTTTAC |
| | | | AGTTCATAGGACAACATCAAACATTAGTAAGTCTAAATAAGATG |
| | | | AATAGAATTTTTGTTATGTAAATTTTGCTAGAACAGTCTATTTTC |
| | | | TTGCACCCCTCAAGTTAACCTCTTAAAAAAATGAATGTATAATT |
| | | | TCTACCGAAAGAATATCAGAGAGAATCTCTCTGGCCTATAGTG |
| | | | TTAAAATATTGTTCACAAATCCTGATTAGTTAAGTGCATACATT |
| | | | ATGAAACTTACAGAATAAAACTTATTATACATCTCTTTCTTAAAT |
| | | | TAATATCTTTACACATTTTCAACTGGCTCCCCAAGTCTGATAAG |
| | | | GAAGGATTAAAAGAAAAAAGAAATGTATTAGTTGGGTGGCCAA |
| | | | GGAGTTTCCTTTGTAATGTTGAGAGACTTCCGCTTTCTGAATTT |
| | | | CGCTGGTTCTCTAAGGTAAAAGAGTTAAATAGTACCCTTGTTC |
| | | | ACCAAGGAAAGTGATCCAAACTATATATCTAGTGCAGATATTTC |
| | | | CTTTGCATTATTTAGTCTTCTCTGGAGAGAAAATACAGTTTCCC |
| | | | CTTCCTCTTTCTCTTCACATTTACTCTTTTCAACCCAAAATAAGA |
| | | | GACATAGAAAGCAAACCACAGCCAGTTTGGCATCTTCTCAGTG |
| | | | CTACTAGTA |
| 1196 | SESN3 | 3387256 | TGACTTGTAACCCTTCAGTGGAATGGGAAATTTCTG |
| 1197 | SESN3 | 3387257 | TGGCTTAGTTAGCAGACCTAGAATCTGCCCAGGTGAGACCTA |
| | | | GAACAAAAATAGCTGGGGTGAAATGGATAAGAGAGGTAGAGG |
| | | | TATATGTCAAGGCAGAGCCCTATGAGGAAGGAAGAGTTTTCAA |
| | | | AGAATATGAGGAACATAGTGCTGAGAGTGTGGCTGCCTTCAG |
| | | | CACCGTACACCTAATCTAGAGAAAATATTTCCCATGTGGGAGG |
| | | | TCCTGTCTGCATTCAGTCCACCCTTTTCTGCCTGCTTCTTCCTC |
| | | | CAAGTGCCTCAACCTCTACATGCTCACTCTCCTCCCCTTCCCT |
| | | | CAGCCCATCTTGGTCTAAGCAGCTTTCACAATCCAAACCAAAC |
| | | | ATCACCAGCCACCCGCTGATAAGTCACCAGCATTTACTTTCCT |
| | | | GAGTTACTTTTTCTCCATTCATTGAGACTATGGATTCATCCCAA |
| | | | CTCCTTCTAAATCCCTCAACCATCCAGCTATATTTTGGCTAACC |
| | | | TTTGCCCTAGACACTCTACCAGATGTTAATGCAGTATCAAGTG |
| | | | TAAATTGTGTCACCCTATTCTGTTCTACCCTTTTCCCTGCTGCC |
| | | | GAAATATCTTGCTCTCCTCTACCTCATCCCCAAAGAGCCTATAA |
| | | | ATTCAGAGTATCCAACCTTTTCATGGATTCACTCACTGTTGTTC |
| | | | A |
| 1198 | SESN3 | 3387258 | CGCTGTTGAACCAAGCTGCTCACTGGACACATATTTGTGTCCC |
| | | | CAGGAGATTATTTGTCAGGCACTGTTTTTTATTTGTTTGTTTGT |
| | | | TCATTTATTGTTGTTTTACTGCTATTGGCGATAACATGAAATGT |
| | | | GATACAGCTATTGCCCATAATTTAATGTGAAATTAATCATGATG |
| | | | AATTCTATAGCATGCTACTGAAATGCCAAATTCAGCTATTTTCT |
| | | | TTCTCTTCTAAAATGGAAGTTTCAGTTTTCCATATCAGATGTAT |
| | | | ATAAGTGGAATTATAACACAATCCTATCACTGACAGTAATCCTC |
| | | | AGTCACCTTAAATAATCAGTGCTCACAGTGCTGCTTACAGTTC |
| | | | ATTTAGTTGGCACATATAAACCTGTACCCACACAAGACTGACC |
| | | | AAAAATTTTCTTTGCACATTTTTCCTTTCTCATAGTTTTTTTCTAT |
| | | | ATTTCGTTAAGCAAAGGAAGGTTAATATGCCTATTTTTCCTGTT |
| | | | AGGCTTTTAGAAATTATTTTCCATGACTTTTGTTCTTATAATAGG |
| | | | TTAGACAGTTTATTTTTCAAAGGTAAAAATTGTGTTTCTATGCAT |
| | | | TAATGTGATTGAACTACAAAAACAGAGTGCAATATGTTCAAAAA |
| | | | ATACTCAACTAAACTTTCCCCCTGTCATATCACTGCAAAAGTGT |
| | | | CCTTTTAAACAGAGCCATAAAGAAATTTTTTTCAAATTTCTTTAT |
| | | | TGCACAGGCTTTTTTCAGTTTTACCTTTCTGGGATTGAACAATG |
| | | | TTCCTTTCATAATGCCAAAGCATTCCCTTCCCCAGAAAAATCTC |
| | | | CTTGGACAACTGGTTTAAAAACGTTATTAAGTCATAGGGGAGG |
| | | | AATAAGCGGCCAAAAAGTCACATTTTTGCATTGGTTTACGTTG |
| | | | CTTGATTAGACTATCTTCAGAGAGCACATTATGTGTTTATAGCT |
| | | | TTAATTTGTATTATGTCAATGAACCAGTGAAGTGCCTAAAGAGA |
| | | | TGCTTACAACTATCCAGTAGGACACAACTGCACTGCTTTTTAAA |
| | | | CACTTTTTGGTTAGTTAAGGGTGACTTGAATTGTACACATACAT |
| | | | GCTAATTTTTGAAAACTTATCCATTTTTCATAGTAAATAATATAG |
| | | | ATAAAATTTTCTGTTAGAGTTCCCGCAAATATTTCATTTTAGACT |
| | | | TACTTGTGATATAAGATTTAACTTTTCTTTTGTGAAAGAATCGT |
| | | | GAACTAGTGTTTCATGAAATCATTTTCCTCTTCCATTTATCATC |
| | | | CTCCTCTGGTACAATATATTGGGTTGCTTTCTTTTAGATTTTGT |
| | | | TCCAGATAGGAAAACAAATATGACTGTATACTTATTAACATAAG |
| | | | GTAGTTCTGCATTTTTGGATTCCAGGATCCTGTTTGAAATCTTC |
| | | | CATGTGAGGAAAAAATTACTAATATTTTTAAAGACAGGGTGGTT |
| | | | TATTTAAAGAGATTATTCAGAGAACTTGTGCCATATCTCGTCTG |
| | | | TTTTATTGCATATGCCATATGTTAACTTTTATTCAATATTACATT |
| | | | ATGTAGATATGTAATACAAAGAAAATATTTAGGAGAATGGCAAA |
| | | | ACACAAATGGCAACATAAATGTCCATTTGACTTACCTAACTTCA |
| | | | CAACTTTCAAGTTGAGGATGTCATTTATTCTTGAATTTGTTTTTT |
| | | | TACTAGATGCTTTCAATTAATAGCCCTATATTTTTGTGCAGGCG |
| | | | AACTGTATAACAGGATAAAAAATGATTTGTATGTATTGAAAAGG |
| | | | AGGAGAAATTCTCACAGAACACCATATGAGCTTTAGACCAAAA |
| | | | GGGGAAACAAGGTTTAAGTAACTAAAATGGCCACTTAGTTTGT |
| | | | GTTTATTTTTTTCCCTGGAAATGTAAGTAGTTGGAGTTTAGGCT |
| | | | ATGGAAATATTAGTGCCTTTAATAGATCTCTTTCCTTGCAAAGT |
| | | | TTCTTTTTAGCTCAGCATTGATCTATCTTATCAATAGGAAAATAA |
| | | | GTTGACTTGGAACTATAAACAAAAACAACACCATATATTTATGA |
| | | | ACCTCAGTGAACCAGCCTAGAAAAATTGACTTCTGCAGGTGCT |
| | | | AAAGCACCTACTAATACGCAGCATGCACAGCATTTCAGGTTGT |
| | | | GAATACCATTTTACAACGAGTTTGCTGTTAACTCTCTTTATCCA |
| | | | ATGCAAACTTGAAATTCTGATGCGGTTTTCCAGGGTGGTATTTT |
| | | | TTCAGAGTATTGAATTTACTATTTAGTAATTTATAGTATAGCTTT |
| | | | TTATATTAAAATGTGATATTTTTAAAAGAGATATCTGGTTCAATT |
| | | | GGTATAATGACGTGATTATGCAATATGCTGATCTACACCTTGC |
| | | | GCTCACATTGTGCCAAACTTAAATGTGCAAGTGTACGTGAGAA |
| | | | AAGCACATGTGAATGTGAATTCTTTAATTCTTTGCTTATTATGTT |
| | | | AAAATTAGTCTTCATAGTCCACTGATGTGTATGCTTGAATAATG |
| | | | TCTATTTACTTTGGAATTTCAAGATTTCCAGCTTCAATGGTAATT |
| | | | TATAATTTCTCAGATCACCTTAAGAAATATTGAGATACTCTCCC |
| | | | ACCTGAAAATAATCTGTTCTTTAACCCACCTGACTATGGGAGT |
| | | | AGCCAGGCAGGTGCCTCACTGGCTTCTTCAGACGAGGCTTCC |
| | | | TCAGGTGGATATATGACTATTAGGGGAAAAGAGGCTTTTGAGA |
| | | | CAGCTTATTACCTCCTTCCCCTTTTTGAACTAAGTACATTGTCT |
| | | | CAGTCCCAGTATGAATTTGTCCCATTTGGGGTATTTTTAAAATA |
| | | | AAAGATGGCTAACATGGAATCTGGGGCATAGCCTTGGCCTTTA |
| | | | ATTATGGTTGTAAGCCCAAATAATGGCAGAGAAACACAGGGCT |
| | | | GTTTTTACAACAGAAAACTCAATATAAGTTTTATATAAGAATCCT |
| | | | ATAAAATTTGAACCAGAGCTCCTATTTAGTTGTTATAATGTCTC |
| | | | CTAAAGATCTTAAATGCTTCTAAAAGCTAATTATTATTCCAGAG |
| | | | CAACTTTTTCCTTTTCCCCCTTATAAAGTTTTTTTTTAAATCCAA |
| | | | AATCTTAGATTTCTGTGCCACAGCAAAATAAAATGATCAACAAT |
| | | | TAAAGATCTGTACTTAAAATAGTACACCATTTTTAGTGGAGGGA |
| | | | GGGTGCATGCCTATATGATGGTAAGATTCTTTTGAACTCTAAG |
| | | | GACAATTCCTCATGGAAAAAATAAATTTCAGTGCATATTATAAA |
| | | | AATGATTTGCACTGTGTTAGCAAAATAAGGTGTTTTAGGTTGTA |
| | | | TTTTAAAGACAATTCTAAATCATTTCTCTGGAAAGCAAGACCTT |
| | | | AAATTCTTCTCTTTAATAGAACTGCTTTTATGCAAAGAGATGGT |
| | | | CTTAACATGGACTAAACAGTACATAACAATAATGTTTGTTATGT |
| | | | AAATAGTATATCACATTTGCTTAGTAGCACAATTCAACAGCAGG |
| | | | CTGAAAGTCGTGGCTCCTCTGCTCAGATTGAGTTTTAAGTTAC |
| | | | CTAATTTATGTAATCAGAATCTATTCTAGGTGGCCGTCAACGTA |
| | | | AACTGTGTTTC |
| 1199 | SESN3 | 3387260 | CTAGTGTCAAAGTTTAGCCGTTTGTTTTTTTTTTTTTGTTTTTTG |
| | | | CGGCTGTAATGTGCAATGATGTGTTTTATTTTCCTTGATGCTTA |
| | | | ACATTACTAACAATTGCAAAAATAATACTGAGGAGCACTACTTT |
| | | | GCATTGTTTGTAGTTGGAGTTTTGGATACTGATCATAAATCATG |
| | | | AATCTGGCGTATTAATGCTTAAC |
| 1200 | SESN3 | 3387261 | TACTTTTAATGGAAGCACGAATGCAAGCTGAACTTCTTTATGCT |
| | | | CTTCGTGCCATAACTCGGCATTTGACCT |
| 1201 | SESN3 | 3387262 | TATGGCTTCAGTACCTAACAGATTTTTTGAAGTCTTAGAGCCAC |
| | | | TCACATCAGGTAAATACCCATTTTACATCCAGCATTTCCCCTTG |
| | | | ATGGGTCTTTATCCCATATTTATATGTTTGCTCTAGATTTTCTTC |
| | | | CTTTTCTAGATTGTATCTAGAAATTCTCTTTACTCTTCAGGAGA |
| | | | ATATATCCAACCACATATCCAACTGGTATAAATATATCAAAAGA |
| | | | ATATAATATTAAAACATATTTTTATAGTAAATTTTGAAAACTTGT |
| | | | GGATACCCATTTTAACTTATCAGCCGAGATGTAACCCCGAAAG |
| | | | AAATGTTCTGCAGAATTTTATCTGAAAGACTCTAGGGAAGCTAT |
| | | | GTATGTCTA |
| 1202 | SESN3 | 3387263 | GTACGTGTTTCAGTATTAAGCATTATACCATAG |
| 1203 | SESN3 | 3387264 | GAAGCCTGAAGGTTTACATTAAGACAGTGACCTGCTATCCTGA |
| | | | GAGAACTACAAAACGCATGTATGATAGTTACTGGCGGCAGTTC |
| | | | AAACACTCAGAAAA |
| 1204 | SESN3 | 3387265 | GGTTCTCCCTGGTGAACAGACTTTATTCTGACATTGGACATCT |
| | | | TCTTGATGAAAAGTTTCGGATGGTCTACAATCTCACATATAACA |
| | | | CTATGGCCACCCATGAGGATGTTGACACAACCATGCTGCGCA |
| | | | GAGCTTTATTTAACTAT |
| 1205 | SESN3 | 3387266 | TGACATGATTATAACATCTGATGTCTCTCGATATATTGAAGACC |
| | | | CTGGTTTTGGGTATGAAGACTTTGCCAGACGAGGAGAAGAGC |
| | | | ATTTGCCAACATTCCGAGCTCAG |
| 1206 | SESN3 | 3387267 | CAGTGGTGTTAGTAAGATACAGTTAATTTATTTCTTAAATGGAT |
| | | | ATTTCTTCCTGTATTAATGAAACAAAAAATAGATAGTAAGTGTG |
| | | | TAGTATAGTACTTGGTATATGGTAAGTACTCAGTAAACACCGT |
| | | | CTCTTTTCTTTATATGTAATGAAGTTTGTTAAGAATTTTAATAAG |
| | | | ATTTATCTGAAATTGGGTAACCGGAGCACTTAATCTTTCCTG |
| 1207 | SESN3 | 3387268 | TTGACCAGCGTTATAAAGTATTCCAGATTCTATGTAAGGATTCT |
| | | | AAGAATAGTTTTTCAAGTCTTTTGAAGAAAATAAATGTTTAAAG |
| | | | TATTCTACAGGGGTCATATTCTGTAGCTTGGTAACAGGGTTAA |
| | | | CTAGCTTTTACTGTTTTTTGTATTTTCAGTTACGCATTCCATTAC |
| | | | TGCAACAGAATGTTTCCCGTATTATGTCAGTAACTACTTCTTAG |
| | | | GGGCAGAATAATGCAGATAATGAACAAAATACTATTTCTTTTGA |
| | | | GTACAGACTTTGAAATATTTGTTTAGATAGAATTAAAGCTAGAG |
| | | | TTTTAGATTTAATAATCAGAATGCTAATTTTAACTTCTTAAGATA |
| | | | AATTTAGGAAAAAAGTATTTGTGGATTGAGGGACCTTTGTACAT |
| | | | TTC |
| 1208 | SESN3 | 3387269 | TTTCAGTCTCTACCTTCTTGGAACTTTAAGCTGGGACTACAGC |
| | | | CTTCAAAAGTGAATTTTGACTAGAAAGTCTTGGACCTTAGCCA |
| | | | A |
| 1209 | SESN3 | 3387270 | CTCTTCTATCTTACCCTCATGCTATTGCTTTCCCTCAGGCTGGT |
| | | | TCATCCTTGAATGTATTTCAGATTGAGTTGAGAGAAACTTTCAG |
| | | | CTTTGTAGTTCATACTCTATCCTGGATA |
| 1210 | SESN3 | 3387271 | GGATTCTCTAAGTGAGCTAGAGGCCTTAATGGAAAGGATGAAA |
| | | | AGACTTCAAGAAGAAAGGGAAGATGAAGAGGCGTCTCAAGAA |
| | | | GAAATGAGCACTCGTTTTGAAAAGGAGAAGA |
| 1211 | SESN3 | 3387272 | TGGTCTCTGCCTGAACTGGTACATGCTGTGGTCCTCCTGGCA |
| | | | CATTATCATGCTTTGGCAAGCTTTGTTTTTGGTAGTGGTATCAA |
| | | | TCCAGAGAGAGATCCAGAAATCTCCAATGGATTCAGGCTAATA |
| | | | TCAGTCAACAATTTCTGCGTTTGTGATCTTGCTAATGACAACAA |
| | | | CATAGAGAATGCATCTCTTTCAGGCAGCAACTTTG |
| 1212 | SESN3 | 3387273 | TTTTAAAGACTGGAGGTATTGCTGAGTGGTTGAATGGTTTGGA |
| | | | ATATGTGCCACAAAGACTGAAAAATCTTAATGAAATTAATAAGC |
| | | | TGCTAGCACATCGACCTTGGCTGATCACAAAAGAGCACA |
| 1213 | SESN3 | 3387274 | GTGCTTATTTTCCTATGTTCACATAACACCTTCCTCACTTATTCT |
| | | | TTCTCCCTTCCAAAATAGGCATGTGTCCTTGTGTGTGTATAGA |
| | | | GCTAAGTATAATTTATGGACATAAGAACTGAAGAAGCCTATGG |
| | | | CCTTTTGGATACCAAGTGTCTTGGGTATATTTGGA |
| 1214 | SESN3 | 3387275 | GAATACTCTACATCCGGTCGTCTGGACAACATCACACAGGTCA |
| | | | TGAGTTTACACACTCAGTACCTGGAGTCTTTCTTGCGGAGCCA |
| | | | GTTTTACATGTTGCGCA |
| 1215 | SESN3 | 3387276 | TCTGTTTCCAGTATGAGCAACTGCATAATTTCAGTGTCTGTTAA |
| | | | TATCAAATGAATATTCATTTGCTTCAATAGTGGCATAATTTATT |
| 1216 | SESN3 | 3387277 | GACAAGAGGACCAAGTGCCTTTATTCCAGA |
| 1217 | SESN3 | 3387278 | AGTGAGCGTGCCCTTGATACTTTTCTGGGGACTGTAATGTAAG |
| | | | CAGAAATTGAGACAAGGGTCCTTGGAACTGGCTGATAGTTTTT |
| | | | TTTCTTCCTAATTTGCCCAAATAGGACAAATAGGTTGATTGGTT |
| | | | CAGAGCATTTCTGCAATTACACTAAAATGCTTGGTTCTGGGATT |
| | | | GAGTAGGTGTGACCATCAAATGAATAACTCTGTGGAGCAGTCA |
| | | | TTTAACATTTCAAAAAGTTATAAAAATGTCTGAAAATGCAATTTT |
| | | | AAAAAAGCAAAACCAAATGAGTCCAGAGCAGCACTGTCCGGT |
| | | | AGAACTGTCTGCAGTGGAAGATGGAAATGTCTGCGCTGTCCT |
| | | | GTAGAGTACACGTGGTCCTATG |
| 1218 | SESN3 | 3387279 | CGGAGAAGAGCTAGCGAGTTCTCTAGATAAAAAAGATTCAGGA |
| | | | GGCAGTTGCATGGGTTGCTCATTTTCGTATCCTGTGCCCTTAT |
| | | | TTTTTCCTTCATCTGCTCCATCGTCTTCCCTACAATATAGTCAC |
| | | | CATAACAAATTTGAGTAGAATTTTGTTTTGTGTAAAGAATATGG |
| | | | TAGCCATAGAAGAGAACATTGA |
| 1219 | SESN3 | 3387280 | TAAAAAGTAGTAATGTTGGCCGCGCGTGGT |
| 1220 | SESN3 | 3387281 | CCATTATCTAGGTTGCACATTTGTGAAAGCATCAGTATATGATG |
| | | | CGTTCCATGGTTGGGATCTAATGATACCCAGATCAAGCCATGA |
| | | | CATAACTAGTGCAGTGTGCAAGATTCAAGCCCTATTC |
| 1221 | SESN3 | 3387282 | AGGTGGTACCTGATGCAGGAATATGTGAGTGTTGGTGTTGGA |
| | | | GAGTGTTGTGAGAGGAAGATTATTCAGCAGAAACAAACCCTTC |
| | | | CTCTGATGAGCAGAAGTGGTGGAT |
| 1222 | SESN3 | 3387283 | TGGCGAGATGTGGTTCTGCTATTTATTTTAAGTTAGAACTCTTA |
| | | | TTCTGAGAGTTTTCCATAGAAACACAGTAAGATATGTGGTTAA |
| | | | GTTCCAGAGTACTGTTAATATTACAGGTATGTTCAGGCATTTGT |
| | | | TAATTAGCCTAGAAACCTAACCACTGGGTATAACGTTTCCAGA |
| | | | GGAACATATATCCTGAAATTCAAGTAACCGCTTCACTAGAGAC |
| | | | TGTCTTTCCTAACTTGTTTACTCAGCATTAAAAAGGTAATGATT |
| | | | TTGGCAAAAAAAAAAATATTTTTCAATATGTTTACTCCAAGGAT |
| | | | GTGCTTGTCGGTTGTGCTGTGTCTAATAGGAAAACTGTGTTAA |
| | | | TGAAGTTCCATCCAATATTTAGGTAGGAGTTGAATGAAGAAAG |
| | | | AGATAAAGTTGGGTAATAATAAGCAGGGTGTTGGGACAACTGA |
| | | | TGGCCAATATCAAACTGGCTTATCCTTGTTCACTTTGTA |
| 1223 | SESN3 | 3387284 | AAAGATCACATTTACCTCATGGGTAACTAAAGCTGGGTTTTGT |
| | | | GGAAGATCATTGTAATTATCTGAAACTGTGACTCTTACTTCCTT |
| | | | TTTTTTTTGGAGTCTCACTCTGTCACCCAGGCTGGAGTGCAGT |
| | | | GGCGCCATCTTGGCTCAGTGAAACCACCGCCTCCCGGGTTCA |
| | | | AGCGATTCTCCTGCCTCAGCCTCCTAAGTAGCTGGGATTACAA |
| | | | GCACCCACCACCATACCCAGCTAATTTTTTATATTTTTTGTAGA |
| | | | GACGGGGTTTCACCATGTTGGCCACGCTGGCTTCGAACTCCT |
| | | | GACCTCAAGTGATCTGCCTGCCTTGGCCTCCCAAAGTGCTAG |
| | | | GATTAAAGGCACGAGCCACCCAGCCCGGCTGTGACTCTTACT |
| | | | TTCAAAACACATTTTATAATATCTATAATGACAATAGCTTCTACT |
| | | | GAATACTACTTATGTGCTAAGCATTTAAACTCTACATATGTTAT |
| | | | CACATTCAAGCATCACAATTAACCTGCGATGAATTATTACTCAC |
| | | | AGTTTATGGATAAAGAAACTAGGGCTCACAGGGC |
| 1224 | SESN3 | 3387285 | TGTGCAGGTCTTGAATTACAATTTGTTCTGCTATCTTTGTACAG |
| | | | ATATTTGAATTTTTTTTTGTTACTGTGTCATGTATGAGAAAGATT |
| | | | GTCATTGATTGTGAAGGAACTGGCTTTTTAAAAAGAATTCCTTC |
| | | | CATATTTACTTAAGTTAAATGTTTACTTGTGAGAACACAAATTTA |
| | | | TTGTTATCAGTAGTTGTAACTTTATTACTAAAATACTTGAAAGTT |
| | | | GCTTGGTATATTTATATGCTTTATAGTTCAGGTTCAATAGAAGA |
| | | | TTTAATTTGTAAAAAGTGTTCTGCTGCTTC |
| 1225 | SESN3 | 3387286 | GTCGGCCGCCGCCAACTACCTGCTCTGTACCAACTGCCGGAA |
| | | | AGTGCTGCGGAAG |
| 1226 | SESN3 | 3387287 | CCCTCCGCCCGCTCTCGCCTCGGCG |
| 1227 | SESN3 | 3387288 | CGTCTCCGCCGTCGCTGGGGCAGCTGCCGCGGTGGTCGCCT |
| | | | CTGGCAGTGCCGCTAGCTTTCAGGCAGTCGCCTCTCCTCCCG |
| | | | ACATCCCGCCTTGA |
| 1228 | SESN3 | 3387289 | GCCAGTAGGCGATGCAAGTTATCTCTGGGGCCCGGAGGACAC |
| | | | GAGTGAGGACCGGGCACCAATCAGGTTCTCGCTCTGCGCCG |
| | | | GCCTTTGTTCTCACTCGGGAGCAGGTTGCGGGCGTCTAGCAT |
| | | | CGGGAACCCGCATTCGACTCGGACGCGCATTGCTA |
| 1229 | NR4A1 | 3415226 | CAGGAGGGCCCCCTGCGCTAATCTGCCCTGGCAGCAGCGAG |
| | | | CTGGCACGCCCTGGGTGCATCATCCGGTGTGCTCT |
| 1230 | NR4A1 | 3415228 | GACCCGCCGGGCCAGATCCCATCTCTGGCGACGCGGAGAAA |
| | | | AATCTGGAAGCCGTCGTCGGA |
| 1231 | NR4A1 | 3415230 | CCGCGCGGCCGGAACTGCGGGCGGGG |
| 1232 | NR4A1 | 3415231 | GGCGCCCCTGCGGTGCAGAGCAGCTCAGGGCCGGCTGGTGC |
| | | | GCGACCCCGGAAAGCGGG |
| 1233 | NR4A1 | 3415232 | AGTCCAATAGCCAGTGAAGGCCTGGTCCTGCCCT |
| 1234 | NR4A1 | 3415233 | GCCTCCACCATGGACAGAGGCCAGGCCCTGC |
| 1235 | NR4A1 | 3415234 | GCCCTGAAGGCAGACGGGATAATGTGGTTGGCCAAGGCCTGT |
| | | | TGGTCCATCCAGAGTG |
| 1236 | NR4A1 | 3415235 | CCCAGGGTCACGCTCATGCTGGGGCTCCCGTCAGCTGACTAT |
| | | | TTTG |
| 1237 | NR4A1 | 3415236 | GTCAGGTCCAGTCAAGAGGGCCCAAAGTG |
| 1238 | NR4A1 | 3415237 | CCAACCAATCTTGGGATTCTCCCTTCGTGCGGTTGTCTGGGAC |
| | | | CTTTTTCCAGGGTCAAAGCAGATCGTGAGGAGGAAGC |
| 1239 | NR4A1 | 3415238 | ATTTGGATGTGGAGCCTCTCCTTTCCATTGTGAACTGAATTCTA |
| | | | CCAGCACTGGGCCTGGTGATGTCTGCATTAGGCAGATGAGGA |
| | | | AGCAGTCTTGGAGAGGACAAGGGACTGGCCTCAGGTCACACA |
| | | | TCAGGCTTGCTAGCTCCTGGACAAAGATGCCTCTGATAGCTCT |
| | | | TCCATA |
| 1240 | NR4A1 | 3415239 | CCTGCCCTGGGCTACTTACTACTGAGGATGCACAAAGGATCTT |
| | | | CCCACCACGGACTAGGAGACAGTGCCCTTGTCCTCATGTTGTT |
| | | | CACATACTGGTCGGTGAGGGATGGGTCTGAGTACATGATAAA |
| | | | TCCCTGGGCCCCATAAGATTTGACTAGGAGGGGTAAGGGCCT |
| | | | GGTGAACTGCTCAGAAAATAAACTGTGTTGTCAGCAGGAGGA |
| | | | CCCCTTTCTACTATGAGATATTGCATTCCCTGCTAATCATACTT |
| | | | GTGCTCTATCTGTTGATAGAACAAATACATAATGAGAAACAGC |
| | | | CACTGTGCTTTCAGAAGAACACACTTGAAAGAATTTGTTCTCAA |
| | | | TAAATTACATCTGCATCTGGATCCATATGAAGAAATACGTTCCT |
| | | | CTCATTCAGGCGTGGCTATTT |
| 1241 | NR4A1 | 3415240 | ATGGCCAAAGCTCGACGGGCGGCCTGCGTCAGTGGCGC |
| 1242 | NR4A1 | 3415241 | GGCTCGGCCGGGGAGTCCCAGTGGCGGAGGCTACGAAACTT |
| | | | GGGGGAGTGCACAGAAGAACTTCGGGAGCGCACGC |
| 1243 | NR4A1 | 3415242 | GACCAGGGACCAGGCTGAGACTCGGGGCGCCAGTCCGGGCA |
| | | | GGGGCA |
| 1244 | NR4A1 | 3415243 | TTCCCTTCGGGGAACGTGCATCTGTTTTTAGGAGCGGTGCATG |
| | | | AAGGAGATGGGTGTACGCGCGGGCAGAGAGGATGTTGTAGG |
| | | | GCCGGCATGC |
| 1245 | NR4A1 | 3415244 | TGTTGGAGTCTTGGGGCGGTGCTGCCTAGAGGATACCTCCCA |
| | | | ACCATTCCAGCTCCAGATGCTGATCATCCCTATG |
| 1246 | NR4A1 | 3415245 | TGAGGCTTGTTCAGCAGAACAGGTGCAAGCCACATTGTTGCC |
| | | | AAGACCTGCCTGAAGCCGGATTCTCC |
| 1247 | NR4A1 | 3415246 | TGTCCTAGTGCAGGCAGATGTGGCCACCCTCACCTCTCGCAG |
| | | | GGTGCTGCATGCCTG |
| 1248 | NR4A1 | 3415247 | GTACTGTTGTCCATTCTCCTGAGAGTCCAGGGGGCTGTGGTC |
| | | | TCCTTCCTCCCCCCTTGCCCTGTCCCCAGCAAATGGCCTTTAA |
| | | | AGGTCTGGAGCCAGGTTACCGATGAGGAGGCCTAGGTTCCCT |
| | | | TCCTCTTTGCTTCTGGGAGCATCTCGAGCAGTGCAGAGTGGC |
| | | | TTCCCAGCCCCAGATGGCAGGATTGGGGTGGGTTTGGGATCT |
| | | | GCTGCCTTTGCTCAGTGTGCAGGGTTGGGGTGGAAATGGGGG |
| | | | ACAGGCTAGGGCCTCTGCATTAGGCTGCCTTCTTAGGCAGGT |
| | | | GGGCTTTCACTTCCAGCTCCTCTTCCATTTTCACGATGTCCTTC |
| | | | TTCCTAGGCACTGCGAGGGGAGGAGAAAAGGGGCTTTGCAGA |
| | | | GGCCTGGGAGTATTCCCAGGAAGTGCCTGGTTGGCGAAACAA |
| | | | CCAGGGAGCTGCTCCTGGGAGCTGGGCTGAGGCTTTGCTGG |
| | | | GCTGCCTCTCCCACTCACCCTTCTCCCGGCCCCCACCATGCC |
| | | | TTCCCCATGGGGGAGGGGCAGGGGGCTGGAGGAACACAGCT |
| | | | TCCCCCTGTTCTAGCAGAGAAATGCTGGCTGTATGCCTCCCCT |
| | | | AGGGTTCCCAGGCTGACTAGGGTGTGGCTGGCCTTCTGATGG |
| | | | AGCCCACTCATGCTGGGCCGCTGCCCAGGGGCTTTGTGGCAC |
| | | | CTAGGTCGAGATGGTACTCAGGCCAGGGGTCAGGATTCCTGG |
| | | | GTGCTCTGGTCCCGGTGCCTCTGTCTCATCTTTAGGCTGGGAT |
| | | | TCCTGC |
| 1249 | NR4A1 | 3415248 | TCCAAGCCCAATATGGGACACCAGCACCGAGT |
| 1250 | NR4A1 | 3415249 | GACCACCTGGCAAGCGACCCCCTGACCCCT |
| 1251 | NR4A1 | 3415250 | CCAGCTTCAGCACCTTCATGGACGGCTACACAGGAGAG |
| 1252 | NR4A1 | 3415251 | CTCGGCCTCCTCCACATCCTCGTCCTCAGCCACCTC |
| 1253 | NR4A1 | 3415252 | GACTTCCAGGTGTACGGCTGCTACCCCGGCCCCCTGAGCGG |
| | | | CCCAGTGGATGAG |
| 1254 | NR4A1 | 3415253 | GGCTCCTTCGGCCACTTCTCGCCCAGCCAGACTTACGAAGGC |
| | | | CTGCGGGCATGGACAGAGCAGCTGC |
| 1255 | NR4A1 | 3415254 | AGAGAGCTATTCCATGCCTACGGCCTTCCCAGGTTTGGCACC |
| | | | CACTTCTCCACACCTTGAGGGCTCGGGGATACTGGATACACC |
| | | | CGTGACCTCAACCAAGGCCCGGAGCGGGGCCCCAGGTGGAA |
| | | | GTGAAGGCCGCTGTGCTGTGTGTGGGGACAACGCTTCATGCC |
| | | | AGCATTATGGTGTCCGCACATG |
| 1256 | NR4A1 | 3415255 | CGCGCAGCCCCAGGTGGGGCCTTTTGTTGGAAATGGAGAGA |
| | | | GGCTGGCCTCATCCCATTGGGACCTGTGGTCTCCC |
| 1257 | NR4A1 | 3415256 | GAAGCTTTCATTTGCCGGGACACTCGGGCCCATGGGATTGCA |
| | | | CAGAGCTGGAGGGAGGGGTGAGATAGGGGCAGATAGGAGCT |
| | | | GCAGGGGTGCCTGGCGAGCCTCTGGTTTTCCTCTGCTCCTCT |
| | | | GCCTGTCCTCTCCCAACTCAAGGTTCTAGTGGGAAGGGGTGC |
| | | | CCCCAGGCTCTCATGTTCCTGGCGTGAGATGAAAGGATCCCT |
| | | | GCGGAGGGTTTGGTTCTTGAGGGCTGGGGGTGGACTTGGGA |
| | | | ACAGGCTGTGTGTTTGTCCCAGCGATGGTGCCTGCTTAGCTTC |
| | | | CCGTCCCCACCCCCCAGCCCCTTGGCCCTCTCCTGTCTGCCC |
| | | | TAGGGAGAAGGCAGGTGGACAAGGGCCCATGAAAAAATACAG |
| | | | GTGTCTAGACTGCCAGGGAGACCCTGGCCCCCAGTAGTGTGT |
| | | | CCTGGGGACTTCCTCAGAGCGAGAAACCTCCCCCAATGTCTT |
| | | | CAAGACTTTTCTCTCCCCCCGCCCAACCCCGTCTCTCCCTCCC |
| | | | TTGCCACCCAAATGTTAGAAAAATAGCTGTGAACAGAGAGCGC |
| | | | TTTTGTCTGCAATGGCAGCAGGATCTGGACGGTCCCCTCCCC |
| | | | TAAGTTCCCCCCTCCCCACCCCACACTCTGACAGCTTGTTCCG |
| | | | TGTTGCCC |
| 1258 | NR4A1 | 3415257 | GCACAGTGCAGAAAAACGCCAAGTACATCTGCCTGGCTAACA |
| | | | AGGACTGCCCTGTGGACAAGAGGCGGCGAAACCGCTGCCAG |
| | | | TTCTGCCGCTT |
| 1259 | NR4A1 | 3415258 | CCCAGCGGGGCAAGGGTAGGCTTGAGTGGAGTGGGACCAGC |
| | | | AGGGCCCCCAGGCTTCTGCCCTGGAGGACCCAGAGGAGGGC |
| | | | ACGTCTTATTTCCACCCCACCTCTGAACCCCAGGCCTTGGAGG |
| | | | GAGGCAGCCTACACCTGCCTGGATTGTGAGGGTGGTGGCAG |
| | | | GGGGAGGTTCCTATAGGGTACCTTGGATCTCAGGGACTCTGG |
| | | | GTCCTAGGGACTCGGTGGGGCGCGTCTCAGCAGTGGTGTGC |
| | | | ACGGCTTGGGCTGAGAGGCC |
| 1260 | NR4A1 | 3415259 | TTGTCCGAACAGACAGCCTGAAGGGGCGGCGGGGCCGGCTA |
| | | | CCTTCAAAACCCAAGCAGCCCCCAGATGCCTCCCCTGCCAAT |
| | | | CTCCTCACTTCCCTGGTCCGTGCACACCTGGACTCAGGG |
| 1261 | NR4A1 | 3415260 | CCCAGCACTGCCAAACTGGACTACTCCAAG |
| 1262 | NR4A1 | 3415261 | CTTTGTGCGTGTTAGGAGAGCTACCCCCTCTGGAAGGACTGA |
| | | | ATGAGAAAGGAGGTTTAAAAAAGAAAGAAAGAAAAGCGACTCC |
| | | | CTCCAGTTCGACAGATCAAAGAGAGGATCCCCCTCTCGGCTG |
| | | | ACCAGATGGGAAAATGCACCCCCTCAGGCAGGTGGCCAATTA |
| | | | GAA |
| 1263 | NR4A1 | 3415262 | GGGATGTACAGCAGTTCTACGACCTGCTCTCCGGTTCTCTGG |
| | | | A |
| 1264 | NR4A1 | 3415263 | GTCATCCGCAAGTGGGCGGAGAAGATCCCTGGCTTTGCTGAG |
| | | | CTGTCACCGGCTGACCAGGACCTGTTGCTGGAGTCGGCCTTC |
| | | | CTGGAGCTCTTCATCCTCCGCCT |
| 1265 | NR4A1 | 3415264 | CTTTCCCTGATACACCTGCCTGTGAACCACCCTGATCGCTCTT |
| | | | CGTGCC |
| 1266 | NR4A1 | 3415265 | CTAAGCCAGGCGAGGGCAAGCTCATCTTCTGCTCAGGCCTGG |
| | | | TGCTACACCGGCTGCAGTGTGCCCGTGGCTTCGGGGACTGGA |
| | | | TTGACAGTATCCTGGCCTTCTCAAGGTCCCTGCACAGCTTGCT |
| | | | TG |
| 1267 | NR4A1 | 3415266 | TCAGATGTACAGCTAATCCTGTACCCTTCC |
| 1268 | NR4A1 | 3415267 | ACCGGCATGGGCTGCAGGAGCCGCGGCGGGTGGAGGAGCT |
| | | | G |
| 1269 | NR4A1 | 3415268 | GAACCGCATCGCCAGCTGCCTGAAGGAGCACGTGGCAGCTG |
| | | | TGGCGGGCGAGCCCCAGCCAGCCAGCTGCCTGTCACGTCTG |
| | | | TTGGGCAAACTGCCCGAGCTGCGGACCCTGTGCACCCAGGG |
| | | | CCTGCAGCGCATCTTCTACCTCAAGCTGGAGGACTTGGTGCC |
| | | | CCCTCCACCCATCATTGACAAGATCTTC |
| 1270 | NR4A1 | 3415269 | TGCACATGCGCACTCTCATATGCCACCCCATGTGCCTTTAGTC |
| | | | CACGGACCCCCAGAGCACC |
| 1271 | NR4A1 | 3415270 | CTGGGCTTGAGCTGCAGAATGACTCCACCTTCTCACCTGCTCC |
| | | | AGGAGGTTTGCAGG |
| 1272 | NR4A1 | 3415271 | GGGTGACCCCACGATTTGTCTTATCCCCCCCAGCCTGGCCCC |
| | | | GGCCTTTATGTTTTTTGTAAGATAAACCGTTTTTAACACATAGC |
| | | | GCCGTGCTGTAAATAAGCCCAGTG |
| 1273 | NR4A1 | 3415272 | ACCCTCCTTCCACATGTACATAAACTGTCACTCTAGGAAGAAG |
| | | | ACAAATGACAGATTCTGACATTTATATTTGTGTATTTTCCTGGA |
| | | | TTTATAGTATGTGACTTTTCTGATTAATATATTTA |
| 1274 | RP11- | 3424282 | GTGTAAAAGTGTGAGACAACACATTTCTGTTGTTTAAGACACA |
| | 121G22.3 | | CAATCTGTGGTACTTTGATACAGCAGCCCTGACAAACTAATAC |
| | | | ATGGGGTGTCTCATTGTAGTTTTAATCAGTAACACCCATTATGA |
| | | | ACTGAAAACGTCTGCTACTT |
| 1275 | RP11- | 3424283 | CAAGAGGTGACCATCAGCAAGCCCAGGAGAGAGGCCTCAGAA |
| | 121G22.3 | | GAAACCAGACCTGCTGATTCCTTGATCTTG |
| 1276 | RP11- | 3424284 | CAACTTGAATGCTTCCTGATTAAATATATACAGGAGTGATTTCA |
| | 121G22.3 | | GAGGAATTT |
| 1277 | RP11- | 3424285 | CCATTAAGACTAACCGTTTTTGCTGGAGCTGCAAGATTTTCCAT |
| | 121G22.3 | | TTCTTCATGAGTCACCCAAACGTTGCCTGAAGGCTAGTG |
| 1278 | RP11- | 3424286 | GTGGCTCTTGAACAACACAGGTTTGAACTGCATCATTCCACTT |
| | 121G22.3 | | ATACACAG |
| 1279 | RP11- | 3424287 | ACTCCTGAGACAACATGACCAATCTCTCCC |
| | 121G22.3 | | |
| 1280 | RP11- | 3424288 | CGTACTTTCAACATAAAGACGACGAGGATAAAGGCATTTATGA |
| | 121G22.3 | | TGAACTACTTCCACATA |
| 1281 | RP11- | 3424289 | GCTTACTTTATTGTACGAATGGAGCATATATGTGTACATATAAA |
| | 121G22.3 | | ACACATAATACATGCTTATCAACTATTTGTGTTATCAGTAAGGC |
| | | | TTCCAGTCAACAGTAGGCTCTTAGTAGTTAAGTCTTGGGAGAG |
| | | | CCAAAAATTCTAGCTGATTTTTTGACTGTGTGTGGGGGGTCAG |
| | | | CACCCTTAACTCCTATCTTATTCAAGGGGCTATTGTATTCTAAA |
| | | | TTGTCTTTTAGCTTGAGTCATAATCCAGGTATAGTG |
| 1282 | RP11- | 3424290 | GCAAAATACAGTGCCAAGAGCTCTGGACCACAAATCAGAAGA |
| | 121G22.3 | | CCTGAGCCCTAATTCCTTTCCA |
| 1283 | RP11- | 3424291 | TTTGTTCGTCGCTTGCCAAAATAGCAGCGAACTCTCTGTCAAA |
| | 121G22.3 | | CTGCAACTCATTTTATCGGAGCAAAAACT |
| 1284 | RP11- | 3424292 | GAAGCAGCTGATCGCTAATATCTGATGGCTAATATGCTAAATT |
| | 121G22.3 | | TCCCTGTC |
| 1285 | RP11- | 3424293 | GAGGCAGTGCAGCTTGTGTTACAACTCAAAAGAGTAATACTCT |
| | 121G22.3 | | GAAAAAAGAAAAAAAAAGATGGCGCTGAAAATAAACATGTTCA |
| | | | GCAGCCATTGTGATTCAACTTACCCAGATGTGCTTTTCATGAG |
| | | | ATGGAGAAGGACGGATGGAAAAGAAAAGCACACAAATGTTAAT |
| | | | GGATACAGTTCAATCCAAAGAAAACCATGGAATAAAACAAGAG |
| | | | CATTATTTAAGATGTGAGAAAGCTCAGGTATGAGAAAGACATG |
| | | | GTGCCATTTTGTATTTCATCATGACACACATACTCACTGCGTCG |
| | | | AAAAGCATAGTCA |
| 1286 | MYBPC1 | 3428597 | GCGAATGCAACTTTGACCCTAAGAAATCCTTTATGCAGGTGGA |
| | | | GACACAGCTTCTTCAACCAATGAAAGAAATAATATCTGGCTTCT |
| | | | TGAATAGTTTCATGGTGCCACCAACAAAAACTATCATAGACCA |
| | | | ACAATGGCAAGATGGCATCGGCAAGAATGAGCTG |
| 1287 | MYBPC1 | 3428598 | CCAGAATCTCATCGTGCAGGCTACAAATAGCAGCTGCAGCTG |
| | | | CAGACCAAGGGCTGGCCTTTACATGTCCATGGTGCAAAAGGA |
| | | | CTCCTG |
| 1288 | MYBPC1 | 3428599 | CAACTGCTTGTCACACCGACCTGCACCATCTCTCGCCTGCCTG |
| | | | TGGGGTTTCTGTCAACTAGTCGTGGAGGGAAG |
| 1289 | MYBPC1 | 3428600 | ATGCCAGAACCCACTAAGAAAGAGG |
| 1290 | MYBPC1 | 3428601 | AGTATCCCCGAATCAAACATGAATGTTGAAGTCAACTACCCAG |
| | | | ACTGAAG |
| 1291 | MYBPC1 | 3428602 | TACACACTAACTTTAATTTGGAATACAGTAAATATTGTATTAGT |
| | | | GTGTCATATATTTACTGAATTAAAAATTAAAATTGGTTGGGCAT |
| | | | GGTGGCTCATGCCTATAAACTCAGCACTCAGGGAAGCAGAGG |
| | | | CAGGTGGATCACCTGAGGTCAGGAGTTTGAGACCAGCCTGGC |
| | | | CAACATGGTGAAACCTTGTCTCTACTAAAAATACAAAAAATTAG |
| | | | CTGAGCGTGGTGGTGGACCCGTGTAATT |
| 1292 | MYBPC1 | 3428603 | TGCCAGGGGACGGTTATGGATTTCTTGGCAGCAAGGAGAAGC |
| | | | GGCTTTTGTGCAGGGAGGAACAGCCTGCCAGTCAACTATATTT |
| | | | ATGGAGCACCTGCTGTGTGGAATCTGAAAAGGAGAAGGAGAA |
| | | | GGGCCTTGTCCTCAAGAAGCTTGTGATCAAAGGGAGAAGAAA |
| | | | AGTCCCCATCTACTGT |
| 1293 | MYBPC1 | 3428604 | TGAACAACGGCTTTGAATGCGAACCTGGGGAGTGTAGACCTA |
| | | | ACCAAATAATAAT |
| 1294 | MYBPC1 | 3428605 | ATTTGGCACGGGAAATGCTATGCTCTTTGTTCATGTGGATGCC |
| | | | TTTACCTACTTGGAAATAGTATGTTCTTTAACAGAAGTTTCTTT |
| | | | GTCAGACTTCATAGCCAGACTGCTCTGTAATAACCAGA |
| 1295 | MYBPC1 | 3428606 | AAAATGAAGTGCCAGCCCCAGCCCCACCCC |
| 1296 | MYBPC1 | 3428607 | CACTCACACACGTTTGGGCTGCAAATACAGAGGGTCCATCCC |
| | | | AGCATGATTTGGCCTCCACGGGTGCTGTGAGCTGTGAGCTTT |
| | | | AACCTAACTCCTACTGAGAAGTTGGATGGTGACCATTGTGATA |
| | | | AGTTGAGAATAATAAAAATAATACACTGTGTTTATATAATCCTC |
| | | | TTGTGTTAATCTAATTTGGATGGCACTTCATATATATTAGGGGG |
| | | | ACAATTCTTATGAAACCTTTCAAATTATGTAAAAGTTATTATGTC |
| | | | CGCATTTTACAGTGTGGAGGCTGAGCCTCCATCCAAGGGGCT |
| | | | GAAGAATTTGTGAGGCTTTTTCCTATATAGTGAAGGTCAAACA |
| | | | AACCCACATCTTCTTTATGAGAGTGGGGAGTGGATCCATCTCT |
| | | | ACCCTG |
| 1297 | MYBPC1 | 3428608 | CTGGCAACAGGAAATGAGTACAGAGATCCAGTGAGACCCTT |
| 1298 | MYBPC1 | 3428609 | AAAAATATGCTTGTACTTTCTACACAG |
| 1299 | MYBPC1 | 3428610 | AGAGAAGGAGGCCGGAACTACACCAGCAAAAG |
| 1300 | MYBPC1 | 3428611 | TCTGCAAGTCCCAATCAGTATAATGACAAATGGTGCATTGCTA |
| | | | AGTTTCCATTACATGTATTTCTAAAAGAAAAACAACAATGATAA |
| | | | AAATATCACAAGCACTTGTTGAGATGCCAGCAAATTAATTGGT |
| | | | AGTTTCCAAGTTTCGACATGCATGCTA |
| 1301 | MYBPC1 | 3428612 | GACACTACTGTTGGGTGATCTAGACGAAGACTATTTCATGATA |
| | | | CTCTGAAGCGCTGCATTCATATGTATTCCTTCATGGTCTAAAAC |
| | | | AACTGTGCATGTCCTCCAAATAGTCTTAACATTTAGTAGACTTT |
| | | | GAAACTACTCACCTATCAAATTTTTGCTTAAAAAACAGATTGCC |
| | | | GGCCAGG |
| 1302 | MYBPC1 | 3428613 | GCACAATGTTGTGGAATGTGAATGCATGCATATTAGTTCAGGA |
| | | | GAAAAAATTCAAAATGAACTAAGTTTGGGAG |
| 1303 | MYBPC1 | 3428614 | TGCTAACAGGAAACAATACCGACGTTCTTTTTCTTATAGCATTT |
| | | | GTATTATAAAAAGCACAAAGCTCCAGCCCACTGAA |
| 1304 | MYBPC1 | 3428615 | ATGAAGTCTTTTCTCCTTGACTTTTTACTCCTATTTCTTG |
| 1305 | MYBPC1 | 3428616 | GAAGAGGAAGTCTCCCCGCCTAGCGCCTTGCCT |
| 1306 | MYBPC1 | 3428617 | GCTTTCATACTTGGAGCTCTACTGATTTTCCATCCAAGCCAACT |
| | | | TGTAGGGTTTTTTCCTTCCTATCACCAGAGGAGACAGGGTTTA |
| | | | GGGGAATCCAAGAAGGTTGAAGTCAGCACT |
| 1307 | MYBPC1 | 3428618 | TTTGGGTAGTCGGGCCCTGGAGAGAAAAGATTCAG |
| 1308 | MYBPC1 | 3428619 | GAGCTCATTTCTTGAAGCTGTATTGATTCTAATCCTTGTCTTAT |
| | | | TCAGATTGTAGTTTTTACGGCAATCTTTCATTACGTTTCCTCTT |
| | | | ACAAGAAAACTAATGTATTGAGAAACAATTAATTTTGCATGATA |
| | | | CACACGCATTCAAGGATCTAGCCAAAAATACCACAGGTTTGTT |
| | | | CTATCATTTTTA |
| 1309 | MYBPC1 | 3428620 | ACTGGCCACCATTGTTTACCTGTTAGGGGACAGGCAAGATGG |
| | | | GGAAGCAAAGGAATTATTGCCATCAAAGAGAGAATAACAGCTT |
| | | | ACCTGGAAAGTTCCACTATTTCTAAGAATTACATAATGTTCATT |
| | | | TGCCCCATCATGGAAGAGATACCCCTGTAAGAATGGGAATCT |
| | | | GTTCCCCTCTACTGATGGCTGCTGGGGGCAGAAAGAATGATG |
| | | | TTGTATTTATCTAGGTTTATTAGACAAAGAAAAGCTACAGCGTT |
| | | | GGTGAGAACAACAAATCCAGGTAAGACTGCCTAAGAAGAGCC |
| | | | TGGCCCTGAAATAATCCTTTT |
| 1310 | MYBPC1 | 3428621 | TGGACCCTTGTCGAAACTCCTCCTGGGGAGGAACAAGCCAAG |
| | | | CAGAATGCCAACTCCCAGCTGTCCATCT |
| 1311 | MYBPC1 | 3428622 | AGCAAAACAAATGACGCTTGTTAAAGAGCAAGCTGAATCCCTT |
| | | | ATGCTTCTTCTAG |
| 1312 | MYBPC1 | 3428623 | ATCACCTTCATAGCCAAAGTCAAGGCTGAAGATCTTCTGAGAA |
| | | | AACCCACTATCAAATGGTTCAAAGGAAAATGGATGGACCTGGC |
| | | | CAGCAAAGCCGGGAAGCACCTTCAG |
| 1313 | MYBPC1 | 3428624 | CATTTGAGATGCAGATCATCAAGGCCAAAGATAACTTTGCAGG |
| | | | AAATTACAGATGCGAGGTCACCTATAAGGATAAGTTTGACAGC |
| | | | TG |
| 1314 | MYBPC1 | 3428625 | TCTACTGGGACTACTCCAAACATTGACATCAG |
| 1315 | MYBPC1 | 3428626 | AGGATGCAGGAGAACTTGACTTTAGTGGTCT |
| 1316 | MYBPC1 | 3428627 | AGTGAGACATTGTGGCCTGGAAGTCTTTCAGACACCCACTCA |
| | | | GAGAAGTCAAGTTTAAAGTGGATGTTCTTCAGAGAATTTTTCAT |
| | | | TTCTGAAAATGTGTTTTGCTTATAGAATATAACAGAGTTGACTA |
| | | | GAAAGAGAGAAACAACTGCATACTAATCTTTTAAAGCCTTTAAC |
| | | | AGTTGCTTTTAAACTTTCTTTTTAAATGTTTCATGACTCTTCACC |
| | | | TATTTTTTTTTAAATGGGGACGAAGAGATATGAAAACTGAGACA |
| | | | TAAGACAAATACCTAGAAACCTCTAAGACTGCACATATGATTTG |
| | | | GTAGAAGTCTGAAGGTATACACATTGTAAGAGGCAGACCTA |
| 1317 | MYBPC1 | 3428628 | ATAGATACACTTTTGTGGGAGGAAAAATAGTGGTAAAAACATG |
| | | | GACTGGAGTCTCAGCTCTACCATTTACTAATTATGTGACTTTGG |
| | | | TCAAATATTTGACCCCTCTGAGACTTGGATTTCACATCTGGAAA |
| | | | TGTGAAGAATAAACACTACTTAATAGAATTATTGTGCAAATTAA |
| | | | ATTAAGTGTAAAAAGCTTGGTTCACAGTAGGTGGCAAATAAAT |
| | | | ATGTACTTCCTCTAAGGAAATGTGTCATTTTCTCTAACATAGTT |
| | | | TATATTCATAAGGAGACAACA |
| 1318 | MYBPC1 | 3428629 | CTCTGTACAACGAAAGATCTTCCTGCTCTGAACAAAGCCAGCT |
| | | | TACTTCAAATAGACATTAGCTAAATCAGATTAAATCTTTTGGGC |
| | | | AGCATCCTGTTATAGGAATTGACCTGTATAAATACTTGTAAGTT |
| | | | GTACTCTACATAAAATTTCTATAACTGTTATACTCTTCACTAGG |
| | | | ATCACCAAGTTATTGAAATTTTGATGTAGATGAAAATACAGTGA |
| | | | GTATTATACAGGTCTATCCCGAGGCTTGGAAAAGAATCAGAAG |
| | | | TGCCTACAGAAATTTGGCTTTTTCTCCTCACTGTAACTTAACAT |
| | | | AGCCATGCAGACAGGGTCATGTGCAGCCACCATGGTA |
| 1319 | MYBPC1 | 3428630 | CAGTGAGTACGAGAAGATCGCCTTCCAGTATGGAATCACCGA |
| | | | CCTGCGCGGCATGCTCAAGCGACTCAAGCGCATGCGCAGA |
| 1320 | MYBPC1 | 3428631 | CTTGATCCTGCATATCAGGTTGACAAAGGAGGCAGAGTGAGG |
| | | | TTTGTTGTGGAGCTGGCAGATCCAAAGTTGGAGGTGAAATGGT |
| | | | ATAAAAATGGTCAAGAAATTCGACCCAGTACCAA |
| 1321 | MYBPC1 | 3428632 | TACATCTTTGAACACAAAGGATGCCAGAGAATCCTGTTTATCA |
| | | | ATAACTGTCAGATGACAGATGATTCAGAGTATTATGTGACAGC |
| | | | CGGTGATGAGAAATGTTCCACTGAGCTCTTCGTAAG |
| 1322 | MYBPC1 | 3428633 | TGGTCACCAGGAGCTGTTGGCTTCTTCTCCCAGGGATAATGAT |
| | | | CAAAGTGA |
| 1323 | MYBPC1 | 3428634 | AGCCTCCAATTATGGTGACCAAACAGCTGGAAGATACAACTGC |
| | | | TTATTGTGGGGAGAGAGTGGAATTAGAATGTGAGGTGTCTGAA |
| | | | GATGA |
| 1324 | MYBPC1 | 3428635 | TCCCTGGTCCAAAATCAAGATACCGAATTAGAGTTGAGGGTAA |
| | | | AAAACACATCTTGATCATAGAGGGAGCAACAAAGGCTGATGCT |
| | | | GCAGAATATTCAGTAATGACAACAGGAGGACAATCATCTGCTA |
| | | | AACTTAGTG |
| 1325 | MYBPC1 | 3428636 | TGACACCTCTGACTGATCAGACTGTAAATCTTGGA |
| 1326 | MYBPC1 | 3428637 | CCTGTTCAGGAGAGTGACCGTCTAAAGGTGGTTCACAAG |
| 1327 | MYBPC1 | 3428638 | TCCACAAGTTAGTGATAGCCAATGCCCTCACTGAAGATGAAGG |
| | | | TGATTATGTATTTGCACCTGATGCCTACAATGTTACTCTGC |
| 1328 | MYBPC1 | 3428639 | AGGAAACAAGCTTCGTCTTGAGATCCCCATCAGCGGAGAACC |
| | | | ACCTCCTAAAGCCATGTGGAGCCGGGGA |
| 1329 | MYBPC1 | 3428640 | GGCAGTGGCCGGATAAGAACAGAATCTTACCCTGATAGCAGC |
| | | | ACTCTGGTCATTGATATAGCTGAAAGAGATGACTCTGGTGTTT |
| | | | ACCACATCAATCTGAAAAACGAAGCTGGAGAGGCACATGCAA |
| | | | GCATCAAGGTTA |
| 1330 | MYBPC1 | 3428641 | CTGATCCTCCAGTGGCACCGACTGTGACAGAGGTGGGAGATG |
| | | | ACTGGTGTATCATGAACTGGGAGCCTCCTGCCTACGACGGAG |
| | | | GCTCTCCAATCCTAG |
| 1331 | MYBPC1 | 3428642 | AAGAAACAAAGCTCCAGGTGGATGAGGCTGAATTTTGATCTCT |
| | | | GCAAAGAAACAACTTTTGAGCCCAAGAAGATGATTGAAGGTGT |
| | | | GGCCTATGAGGTCCGCATCTTTGCAGTCAATGCCATTGGCATC |
| | | | TCCAAGCCCAGTATGCCCTCCAGG |
| 1332 | MYBPC1 | 3428643 | CCTCCTACTCTTCTGACTGTGGACTCTGTCACTGACACGACTG |
| | | | TCACGATGAGGTGGCGCCCCCCAGACCACATTGGTGCAGCAG |
| | | | GTTTAGATGGCTATGTGCTAGAGTATTGCTTTGA |
| 1333 | MYBPC1 | 3428644 | GTGCCTCAGGTCAGAAGCCACAGTCTGCACAGAGCAGGCTGT |
| | | | GCTCTCCTGAGGAACCCCCCTAACACCGTTTGGTCTCTTCCGT |
| | | | CACTGCTCTGAGGACAAATCTCTTTGCACACTTTGCATACTTTA |
| | | | CTAACAGAGAATGCTGACTGCTGATACGATATTATTC |
| 1334 | MYBPC1 | 3428645 | GTACATCAGCAAAACAGTCTGATGAA |
| 1335 | MYBPC1 | 3428646 | TCTGATTGACAAGACGAAGTTCACCATCACAGGTCTGCCAAC |
| 1336 | MYBPC1 | 3428647 | TGCGTGTGAAGGCTGTTAATGCAGCTGGTGCCAGCGAGCCCA |
| | | | AGTACTATTCTCAGCCCATTCTCGTGAAGGAAATCATAG |
| 1337 | MYBPC1 | 3428648 | ACCTCCAAAGATTCGCATTCCAAGACACCTGAAGCAAACCTAT |
| | | | ATCCGCAGAGTTGGAGAAGCTGTCAATCTGGTTATACCTTTCC |
| | | | AG |
| 1338 | MYBPC1 | 3428649 | AATAAAACCAGAAGTGGCAACAAGGCAG |
| 1339 | MYBPC1 | 3428650 | ATAAACATTCGCAACTCTGAGACTGATACAATCATATTTATTAG |
| | | | AAAAGCAGAGAGGAGCCACTCTGGGAAATATGATCTGCAAGT |
| | | | CAAAGTGGACAAATTCGTGGAGACCGCATC |
| 1340 | MYBPC1 | 3428651 | CCAAATTGTGAAGATTGAGGATGTCTGGGGAGAAAATGTCGCT |
| | | | CTCACATGGACTCCACCAAAGGATGATGGAAATGCTGCTATCA |
| | | | CAGGCTATACCATTCA |
| 1341 | MYBPC1 | 3428652 | CTTTCTCTGGTTCATCAGTAGCAAAAGG |
| 1342 | MYBPC1 | 3428653 | CCAACTGGGGCTATGGAGAAGTGATGTGGCAGAGCAGAAAGG |
| | | | AAAAGACCTGTGGAGCCACAGAGCTGGTCTTAAACCCCAGCA |
| | | | TTGCTACTTAAGACCACATGTATAAGGACCACACGTGACCACA |
| | | | ATCACT |
| 1343 | MYBPC1 | 3428654 | GGTTTACTGTCATTGAGCATTATCATCGAACCAGTGCCACCAT |
| | | | TACTGAATTGGTCATAGGGAATGAATATTACTTCCGGGTCTTTT |
| | | | CTGAAAACATGTGTGGCCTCAGTGAGGATGCCACCATGACTA |
| | | | AAGAGAGTGCAGTGATCGCCAGG |
| 1344 | MYBPC1 | 3428655 | TCAGAGGCACCCATGTTTACTCAGCCTTTGGTTAACACCTATG |
| | | | CCATAGCTGGTTACAATGCCACCCTAAACTGCAGTGTG |
| 1345 | MYBPC1 | 3428656 | GTACCATGTTCTTCTATCACATCAGTTAAAGTCCCTGTCTTGTA |
| 1346 | MYBPC1 | 3428657 | CACTACACTGTCTGCGATAGGTTAAAGTAAACAACAATTACAC |
| | | | TACACTGTAAGACAGAATATGAATGTGCTTTGATAAGGGTACA |
| | | | GTGTGCTAAGAAGGGAGCTATCATATCCAGTTGAAGAGATTAG |
| | | | AAAGGTTTCAAGGTTTCATGTTTGCATTTGAAAAGAACAACGAA |
| | | | TTAATGAATATCGCCCATAGAGATGTACATATCCCTGGGTGCA |
| | | | AGACAGAAAGTACCCTAGAATTGGGAAAATTTATGAACTTCTTT |
| | | | TTTTCCTGTATATACCTTGATCAGAAATAGGGAAGTCGTC |
| 1347 | MYBPC1 | 3428658 | CACTGGCTTTGATGGTCTATTAATATGCCAATTACAGATATGTT |
| | | | TTGACCTAAGTTTCTTCA |
| 1348 | MYBPC1 | 3428659 | GGATGATCCAAGATACAGGATGTTCAGCAACCAGGGAGTCTG |
| | | | TACCCTGGAAATTCGCAAGCCCAGCCCCTATGATGGAGGCAC |
| | | | TTACTGCTGCAAAGCAGTCAATGACCTT |
| 1349 | MYBPC1 | 3428660 | GCCTTACTATTGAGATAACCCTTACAAATTTAAACATTTTTAGC |
| | | | TGCTTTATTGGCTTTAAATGATTAAGTTCATAATTGCAAGTCAT |
| | | | CTGGTTTCTAAACTGCTAGCCTTATTAGTTCCAAAGTATTGTTG |
| | | | ATGCTTTTG |
| 1350 | MYBPC1 | 3428661 | TATATCAAGGAGTAAATACCCCTGGACAACCAGTCTTCCTGGA |
| | | | G |
| 1351 | MYBPC1 | 3428662 | TTATATCCCACTGGATATTCTACTTTCCGTTCCATTCCTCTTAC |
| | | | ATGAAAATGCACCTTGCATGTAAAGCTTGACTTTCTCATTTGCT |
| | | | TTTAATTGTACCCCTTAGCAGCTCATGGCATACAGTGCTTATG |
| | | | CCATGAACAAGGAAGGCCAAATTATTCAAGGATATTAAG |
| 1352 | MYBPC1 | 3428663 | TGTACACTAACACTTTGTCTATTGTCTATGTTTTTCTTTTGTTGA |
| | | | AAAACACGATATATATATGTTGTAGGGTTTTGGTTTTTGTATTT |
| | | | GTTTTAAGCTAATGGTTTGGAAGCTCTT |
| 1353 | MYBPC1 | 3428664 | GTCATAAGCCATACCAAGCCTGTGGAGTATGGCATGATTTTCA |
| | | | TTACATAATCCAATGAAAATAGACTTATTTTAAATCCCTAACTTT |
| | | | GTAGTTTTAATTTGTATTTCACTATCTTGAAATTAACAGCTAGTA |
| | | | CTTATCCATCACAGCAGTCTCCTACTGACATGAAGCAAGTTGT |
| | | | TGAATGCAGTAGAGCATGAATGAAAGCATTTAATGTAGACAAA |
| | | | AATGGGTGATACCCAAGCATTCTGAATTATTTGCATCAAGGAA |
| | | | TGGACATGTACATAAGTGGCATCATTTCTACCAATATGTGACTT |
| | | | GAGTTGTTTTTTTAAAAAAAGGAGAATGACTTTCTCAAATTTGC |
| | | | ATTAAAGAAGTTTTTAAGAATGTTCAAATGGCATGCTGCTTTGT |
| | | | CTGGACGTGAATTTATTAGCAAGTAGTAAAGCACTTCACTAAA |
| | | | GGACCATGAATTTTTGTGGTTTCATGGATTCTCTCTTGAAGGG |
| | | | TACTTTTATTTTTTTAATATAATTCAGAAACTCAGAAGGTAGGTA |
| | | | TGAAATATTGGTAGGTGTTTCTCGCACCTTCAGAAAGTATTGG |
| | | | ACCGGTCTTATTATTATAATTTTAACAAAATATTTCCAATTTTTG |
| | | | TGCTTTTGACATGCATAAATGACCAAAGTTAAAGGGAGTAGTT |
| | | | TTTATCTTTTCTAATGTGCTTGAATCGAAACTCTCTGTGCCTAA |
| | | | TTAAAAAGAACATTAACAAACTGGAAGCAGATCTTCCCACTGA |
| | | | TCCATAATGTGGTATGCATTTATTCTGCTGTTCAGTCAGAACAT |
| | | | TTAAATCATCTATGAGGAATCACAAAACCTCTCAAAGAGCAATA |
| | | | AATACTTTCCAACCACTTGGGAATTTAAATGAAGATTGAACAAT |
| | | | AGTAGGGGAAAAACTGCTGTGGTTCTACTGGGAAC |
| 1354 | MYBPC1 | 3428665 | AGACTCCTCTTGCAAGGCGTACCTCCAAACATAATTGATTCGT |
| | | | ATCTGCGAGACTTACACTCAAGCAATC |
| 1355 | MYBPC1 | 3428666 | TGGCTACTGTCTCTCTGCACTCTGCTGCTTTGAAATCTGGTTG |
| | | | AAATGAGAAAAAGCATTTTCTGTTTTCCCACCAGGCCCCCAAG |
| | | | TGTGGTCTTTTTCTTTCCTCCTAATGTTGAAGAGA |
| 1356 | RP11- | 3454981 | GGCTGCGCTGCTCTTTGATTGGCTTCGTTAATATTTGGCAAAG |
| | 923111.3 | | CATTGCCACTTACCCACTCAGCGAAGATGCACAAAAACGTCAT |
| | | | CACTGATTCTTTCAGTTCGATGCCTGTTAACTGCGGGTGTAAA |
| | | | CTGCTGGTGATGGTGTCATTTACTACCAAAGAAGTGTGGAGCA |
| | | | GGATGGGTGAGAGAGTGAGTGAGTGAGCAGGTGGAAGGACA |
| | | | GTGGGTGAAGGATAAAAAGGTGGGAAACATTTTTTTTTTAAAA |
| | | | AGTGAAACTTCAAATACAGCGGAGGTGGCTTCTTTCCTATGAG |
| | | | GCTGGCTGATGGGTGCCAGATACCAAGGCCCATGTGTTACTG |
| | | | AGGAGACAGCCTGCTGGGCTGGGGTCAGGAGCTAGCGGAGG |
| | | | GAAACGGTTAGATCTCAGAAAAATCTCATCACTATGCCCTAGT |
| | | | AGCTTAATGACATCACTAGCATGAGCACATGGTGTACTTGGCG |
| | | | GGATCTT |
| 1357 | RP11- | 3468066 | TCACCGGCTGTCACATAATACTCTGAATCATCTGTCATCTGAC |
| | 755011.2 | | AGTTATTGATAAACAGGATTCTCTGGCATCCTTTGTG |
| 1358 | RP11- | 3468067 | ACCAGAAGACTCATTAGGATCCATAATAGCTGCCAGTGTAGAG |
| | 755011.2 | | GAGCCTCAGTTACTTTCACTTTGATCATTATCCCTGGGAGAAG |
| | | | AAGCCAACAGCTCCTGGTGACCACAATAAGAGATTTC |
| 1359 | RP11- | 3468068 | TGTGTGAAACAAGGATTATCCAGTAAAATCTGTTGGGTTTCAA |
| | 755011.2 | | AGCTATAACTAGAATAATTATTTTTGCAAGATAGTGCTTGGCTT |
| | | | GAGTCAAAACATGAGGCATTTGTACTCAACAGGTTCTCTTTCT |
| | | | CCC |
| 1360 | RP11- | 3468069 | GAGCCACCTGCTCGCACTCAAGATGAATCAGGTGCAACTGCT |
| | 755011.2 | | AAGAGTGGATATTACCCCCATGTAGGCTCTTGAAGCACATTAG |
| | | | TAAGAATATCATTTAATGCATTTTAAAGATAACTATGATTCTCTA |
| | | | TTAGAATGAACAATCTACACTGTACCAATTACTACAAATCCTGC |
| | | | TGTGTAATTTACTGTACCTTTCAACATAACATTTCATTTTAAGAT |
| | | | TTAAAATTTCTAGTTTTTAATTTTAAGATTACTCACAAGGAACCT |
| | | | G |
| 1361 | RP11- | 3468070 | TAAGCCACACCCATTTACATCTGAGGTCACAACTACTCATCAG |
| | 755011.2 | | ATTTTGAATAATCCTCTTTCTACTGCTTCACAACAGTTCACAAG |
| | | | CCACAACA |
| 1362 | RP11- | 3468071 | TCTGTTCTTATCCGGCCACTGCCTTCCATAATAGCCTAAGAAG |
| | 755011.2 | | TGG |
| 1363 | RP11- | 3468072 | CTTGACATGTCAGCTTGATTCTAGAAGTGCGTTTACCTGGAGG |
| | 755011.2 | | ACTTACCCACAACTTTAACCTTGATGCTTGCATGTGCCTCTCCA |
| | | | GCTTCGTTTTTCAGATTGATGTGGTAAACACCAGAGTCATCTCT |
| | | | TTCAGCTATATCA |
| 1364 | TNFRSF19 | 3481420 | CACTGATCAGATTACAGGCATTTCATCTCCCTGCTCGTCTGCC |
| | | | TTTGATCTGCATGGTTAATTTTATTTTCCTGGATTTGAAGTTTC |
| | | | GTCTGGGCTTGTGCTGA |
| 1365 | TNFRSF19 | 3481421 | GTAAGTACTGCAAAGAGCTCAGCATGTTGCAG |
| 1366 | TNFRSF19 | 3481422 | ACACTCAAATGAGGGAAAGTGGGAACTATAGTGTTTGTTCCCT |
| | | | CAGCATCTGAGGGGGACTGCTTTCAGGACACCCTCTTGGATA |
| | | | CCAAAATCTGCAAATGCTCAAGTCCCTTACAAAAAATGGTATAA |
| | | | ATTTGCATATGCTCTG |
| 1367 | TNFRSF19 | 3481423 | CGTTGCCGGGCTACGGGAGAGCGCGGAGCCCTGCGCTGGGA |
| | | | GGTGCACGGTGTGCACGCTGGACTGGACCCCCATGCAACCC |
| | | | CGCGCCCTGCGCCTTAACCAGGACTGCTCCGCGCGCCC |
| 1368 | TNFRSF19 | 3481424 | GGGTTATCTTCTAGTCCACATGTCACATAATATGTACCTTTATT |
| | | | TACCTTTTAAACTGAAGTTTTAAAACCTGGGTTTTAAAAAGAGA |
| | | | ACAACTACCCATCAGCAATTACAGAAGACAAAGGAACTTGTGT |
| | | | GTCTGAAGACTGAGTGTTATTTAGCAGCTCTTTGGTCAGCTTG |
| | | | GATTGGTCACATATGTGGAAACTGGGAAATAATAGGGGCTACT |
| | | | TACACTGGAGAAGAACACTACAAATGGTGTAAAGAGTGGTTTT |
| | | | GGAATGTATCCAGACTTCCTTCTAAAATAAAAATTTAAACAGCT |
| | | | GTGTTTGAGAGATGGGTATGCACAATTCTTGTAAGAAAGACTG |
| | | | TGTAGATGTTTGAGGTCCCCTTAGTCCCTGATGCTACCATTGT |
| | | | TCC |
| 1369 | TNFRSF19 | 3481425 | TTGTCTGTATTAGAGCACTACCTTCAAGAAATGGGGTTCTGAC |
| | | | CTGGATTTGTGCTACCACAGTGACTTGCATT |
| 1370 | TNFRSF19 | 3481426 | AACTCTCCAACAATAAATACATTTGATAAGAAAG |
| 1371 | TNFRSF19 | 3481427 | TAAAAGTGCTACTAGAACAAGAGAA |
| 1372 | TNFRSF19 | 3481428 | GTGGAGAAGGTTTGTACAGAATTATATGCATCAAAAACAATGT |
| | | | CC |
| 1373 | TNFRSF19 | 3481429 | AGACTGTAGACAGCAAGAATTCAGGGATCGGTCTGGAAACTG |
| | | | TGTTCC |
| 1374 | TNFRSF19 | 3481430 | TAGCTCAGCAGATCCAACTCCCATGG |
| 1375 | TNFRSF19 | 3481431 | CCCAGCCTCCCGATTGGGAGACACCTCCCAGCAGGGGTCGC |
| | | | CAGACACCTCATACAGGAGAGCTCTGGCTGGCATCTGGTGGG |
| | | | TGCCCCTTTGGGACGAAGCTTCCAGAGGAAGGAACAGGCAGC |
| | | | AGTCTTTGCTGTTCTGCAGCCTCTGCCAATGATACCCAGGCAA |
| | | | ACAGGGTCTGGAGTGGACCTCCAACAAACTCCAGCAGACCTG |
| | | | AAGCAAAGGGCCTGACTGTTTGTAGGAA |
| 1376 | TNFRSF19 | 3481432 | GTCTTCTCAAGGATTCGGGGAAGTACTGCGTACTTCCTTCAAG |
| | | | CTTTTAAG |
| 1377 | TNFRSF19 | 3481433 | ATGTGGCTTCGGCTATGGGGAGGATGCACAGTGTGTGACGTG |
| | | | CCGGCTGCACA |
| 1378 | TNFRSF19 | 3481434 | GCAAGCCCTGTCTGGACTGCGCAGTGGTGAACCGCTTTCAGA |
| | | | AGGCAAATTGTTCAGCCACCAGTGATGCCATCTGCGGGGACT |
| | | | GCTTGCCAG |
| 1379 | TNFRSF19 | 3481435 | TTATAGGAAGACGAAACTTGTCGGCTTTCAAGACATGGAGTGT |
| | | | GTGCCTTGTG |
| 1380 | TNFRSF19 | 3481436 | ACGCAACACAGGCAGAGCCAAGGGGACGCCTGGCCTTTTGA |
| 1381 | TNFRSF19 | 3481437 | GTACCTGCCTGCTAAGGAACAGACCCACCTGCCTGCTGTGGT |
| | | | TGTATTGCCAGAAGTGTTGGATTCACATCTTGGCTGCGCTTTG |
| | | | TACTGATGGTGTAACCTTGGGCAAATAGTCTCCCCTCTTTGAA |
| | | | CCTCTGTTTACTCTGGAAAATGCCCAAGTCTGCAGATTTTGGA |
| | | | TAGAACTAAATGAACTAGTAGTCCAGCAACATGATA |
| 1382 | TNFRSF19 | 3481438 | TCGGCCATACCCTGACCCAGATGTGTTCTTTGGAGGGTCTGCT |
| | | | GCTTTGGAGTTGTCCTGGACGGGGAGGATCTCATGGTGCATC |
| | | | TGGCTCTGATGTTTGTCTTCTGGGGCTTCACCTCCCCTGGTGG |
| | | | GTGAGCACTGAAGGGTACCGGAAAGTGGGTTCCATGGAGTTT |
| | | | TGTGCCTGA |
| 1383 | TNFRSF19 | 3481439 | GCAGCTCAGATGGGGGCCAGGTGCTGTGGCTCACGCCTGTAA |
| | | | TCTTACTACTTTGGGAGGCTGAGGTGGGAGGATCACTTGAGC |
| | | | CCAGGAGTTCAAGACCAGCCTGGGCAACATAGTGAGACACCA |
| | | | TATTCACAAAAAATAA |
| 1384 | TNFRSF19 | 3481440 | CCTCTGCATGATGAGCCCACAAAGCCAGTGCCTAAAGGACTA |
| | | | ATTAAGGGCTCCATTTACTGA |
| 1385 | TNFRSF19 | 3481441 | TGGTATTTATGGTAATTAACATACAAAACAGCTGTACTTACAAT |
| | | | CCGGCAAGTGCCAAAGAGG |
| 1386 | TNFRSF19 | 3481442 | GTCAGGCCCCCTGGAAGATTTGGCCAGCAGGGCAGTGGTCTG |
| | | | CGTGCCC |
| 1387 | TNFRSF19 | 3481443 | CCGGCCCTGGAGGGAGCGGGCGACA |
| 1388 | TNFRSF19 | 3481444 | TCCCTAAGTGAAGCTGACCCACACATAACCCACACCC |
| 1389 | TNFRSF19 | 3481445 | GTGGCTTCTTGCTGGACCTAGCTTAACGACGAGCCTG |
| 1390 | TNFRSF19 | 3481446 | TCCAACTCCTACCTTGGGAGAGAATGACAGTGAACCAAACAAG |
| | | | TAAAGTAT |
| 1391 | TNFRSF19 | 3481447 | GGAGAGCACAGCCAGGCCACAGTGGCC |
| 1392 | TNFRSF19 | 3481448 | CAGCAGATCTATTGGAGTGTGCCTGGCAGCTGGTTCTGCAGG |
| | | | AGCTCACCTGCCCTAATAGAATGTTCAGGCCCTTCTG |
| 1393 | TNFRSF19 | 3481449 | ATGCAGTCACCTCCACAGAATGCCCCCCGCCCCTGCCCCAGG |
| | | | ACACCCAGACGTTGCTCAGCATGCTTACTGCCCCCACGTCTG |
| | | | ATCACAGTGGCCCGTCATGCAGACACCAAGACCAATGGGAAG |
| | | | GCGGAGGACCCCGAACATCTCTGTG |
| 1394 | TNFRSF19 | 3481450 | GGTGCCTGCCAGCTTCGCCATAAACACTGCATCTGCAGTTGTT |
| | | | CAGAGCATGCTGACCCCATTCC |
| 1395 | TNFRSF19 | 3481451 | GTGCCAGCAAGGTCAACCTCGTGAAGATCGCGTCCACGGCCT |
| | | | CCAGCCCACGGGACACGGCGCTGGCTGCCGTTATCTGCAGC |
| | | | GCTCTGGCCA |
| 1396 | TNFRSF19 | 3481452 | GTAAGAGACAGTTTATGGAGAAGAAACCCAGCT |
| 1397 | TNFRSF19 | 3481453 | GTAAGTTTTGAGCTCATTACATTTCTTAGCATTTAGGGGAAGG |
| | | | GCATTTATTACTATTGTCGTGCAAGTGTTCCACAAGAGACTTG |
| | | | GCTGAGACAAGCACCAGTGAGTTGTGAAAGAACGCA |
| 1398 | TNFRSF19 | 3481454 | AGCTTTGTAAGGAGACTTACAAGGCTGTGATGTCCCTGCGCCA |
| | | | CTAGGCAAAAATAAA |
| 1399 | TNFRSF19 | 3481455 | GGTCTCTGCGGTCACAGGACATTCAGTACAACGGCTCTGAGC |
| | | | TGTCGTGTTTTGACAGACCTCAGCTCCACGAATATGCCCACAG |
| | | | A |
| 1400 | TNFRSF19 | 3481456 | TGCGCTTGCTCCCATCCATGTGCTGTGAGGAGGCCTGCAGCC |
| | | | CCAACCCGGCGACTCTTGGTTGTGGGGTGCATTCTGCAGCCA |
| | | | GTCTTCAGGCAA |
| 1401 | TNFRSF19 | 3481457 | GGAGATGGTGCCGACTTTCTTCGGATCCCTCACGCAGTCCAT |
| | | | CTGTGGCGAGTTTTCAGA |
| 1402 | TNFRSF19 | 3481458 | AGCTCAACGTCTTTGGATTCAAATAGCAGTCAAGATTTGGTTG |
| | | | GTGGGGCTGTTCCAGTCCAGTCTCATTCTGAAAACTTTACAGC |
| | | | AGCTACTGATTTATCTAGATATAACAACACACTGGTAGAATCAG |
| | | | CATCAACTCAGGATGCACTAACTATGAGAAGCCAGCTAGATCA |
| | | | GGAGAGTGGTGCTGTCATCCACCCAGCCA |
| 1403 | TNFRSF19 | 3481459 | GTAAGGCAGCGACTGGGTTCCCTGTGA |
| 1404 | TNFRSF19 | 3481460 | TGACTTACAGTAGATCAGAACTCTGTTCCCAGCATAAGATTTG |
| | | | GGGGAACCTGATGAGTTTTTTTTTTGCATCTTTAATAATTTCTT |
| | | | GTATGTTGTAGAGTATGTTTTAAAATAAATTTCAAGTATTTTTTT |
| | | | AAAAAACTAACACAGCTAATATATAAGAGCAAAGTGGACAGCT |
| | | | GCATTCTTTTATTCCTCTTTGTAAGTACAACCACTTAGCACAGC |
| 1405 | TNFRSF19 | 3481461 | ATGTCATTCTGTATCCTGGCCTGATTATATCAGAGAC |
| 1406 | TNFRSF19 | 3481462 | GAACTTTTAGGGGATTCTATAGACAAAACATTTTTTAGCTTTGG |
| | | | AGGGAAAAAATTGGTTTCATTCTCAAAACGGGGGAATGGAGAA |
| | | | GTAAGAGAAGGGAGACGAGTGAATGAAGGAAAAACAAATTAG |
| | | | GCAGTTAACACATACAAAGTATCTACCTCTGAGCTCTGCCTGG |
| | | | AGTTAGGAAAGGCTGTTCACTGATCTTGTTCTTTTGAGCCATC |
| | | | CA |
| 1407 | TNFRSF19 | 3481463 | GCCTCTCTTGTTAGGAGATCATCTGAAGAACTAGGGTTACGGT |
| | | | GCTGCCAGCTGACTAATGACTGTTTTTCAGTTTTGTCAGGAAA |
| | | | CAGAATTACCACTCACCTTAATTTTGTAGCTTGTACCCAAGTTT |
| | | | GTGATGTCAATTGCCAAGACTAAGGAATGAAACGTCTTCATAC |
| | | | GAGGTCATCCCGGAGCCAACTCATTGCCTGCTTT |
| 1408 | TNFRSF19 | 3481464 | TTGTCGTGCTCCTTCCAATTGTGTAAGATTAGTTAGCACATCAT |
| | | | CTCCTACTTTAGCCATCCGGTGTTGGATTTAAGAGGACGGTGC |
| | | | TTCTTTCTATTAAAGTGCTCCATCCCCTACCATCTACACATTAG |
| | | | CATTGTCTCTAGAGCTAAGACAGAAATTAACCCCGTTCAGTCA |
| | | | CAAAGCAGGGAATGGTTCATTTACTCTTAATCTTTATGCCCTG |
| | | | GAGAAGACCTACTTGAACAGGGCATATTTTTTAGACTTCTGAA |
| | | | CATCAGTATGTTCGAGGGTACTATGATATTTTGGTTTGGAATTG |
| | | | CCCTGCCCAAGTCACTGTCTTTTAACTTTTAAACTGAATATTAA |
| | | | AATGTATCTGTCTTTCCTAGTATGTTTTTATCTTCTCATGTATTA |
| | | | TCCATGGTTTTCTCTGTTTGTGACAGATTAGTAAAATTTAATGA |
| | | | GCCCTCTTTCTTGTGGCCGTTTCTCCATAGTTTTAGGTTTTGAT |
| | | | ATGTGTTTACTAGCTTGCCTGTGTCTGGTACATCTCATGACCT |
| | | | CAATTCCCTCACCTGAAATAGGAAATGAGAATGTTTCATTGTA |
| | | | GCCCCAAGCGGTCATGTCAACCTAGTGCCTAGTCATAATTAAT |
| | | | TGACTTTTCCTGTATTACTTCTTTTTTTAAGTATAAACCAATGAT |
| | | | CCTTTGGTAGTCAAGAACTCTTAGGAACATTGCCTTTTGGACA |
| | | | TGTAAAATATTTAGGATTTGACCACACAATGGCTATGAAAATGC |
| | | | AAGTAGTTTCCTCGCGTGACCTCACCATGATTCACATACGTGC |
| | | | CACTGTTTGAAATCTGGTCTGTTTGCATTTCTGTTATGACAGAG |
| | | | AGATGATGTTTGCATTTCTGTTATGACAGAGAGATGATGAAAG |
| | | | TAGGCAGGGCTGTGTTCCTTTGTGTAGCCTGTATATATTTTCC |
| | | | ATATGTAGAGCCCTGATTAACTTCAAGGACAAACACTGGCTGG |
| | | | AGAAAGCCAGACTGATGGGAATGAGACTTTGGCCAAAAATCC |
| | | | CAAAACATCATTTTCAATCAGTAGAGAAGTGCTTAGGGTTGAA |
| | | | AATTGATTTCATTTGCTACTGAATTTGGTAAATCCTGGGTAACT |
| | | | TTTATCAAGATGAAGACATTTTACCCTACCTACTCTAGAAATAT |
| | | | ACAACAATGTTATATTTTACACTCCTTGGAAACATTTGAGGAAA |
| | | | AAAATGCAATTTGCACTTCACTTTGTTGGAATATCCCATAGCAC |
| | | | TCAATAAACTCAGCTGCTAGAGTGCCGATGTCA |
| 1409 | LPGAT1 | 3512095 | GACCTTTCTTTGTGTTATCTGCATGTTGTAACGTGTGATAAGAA |
| | | | TGAATGTAAAGGCTGTGGCAACTGTAATTAATTTTTGTAAAGG |
| | | | GCTGGTCACACGTGGATCTGGTTTATGAATG |
| 1410 | DEGS1 | 3579471 | GACTTCGAGTGGGTCTACACCGACCAGCCGCA |
| 1411 | NUSAP1 | 3590391 | CAGGGATTTGAACCGCGCTGACGAAGTTTGGTGATCCATCTTC |
| | | | CGAGTATCGCCGGGATTTCGAATCGCG |
| 1412 | NUSAP1 | 3590392 | CTGGACTCCCTCAAGTACAGTGACCTGCAGAACTTAGCCAAG |
| | | | AGTCTGGGTCTC |
| 1413 | NUSAP1 | 3590393 | TTAAAAGCCTTGAAAGGCTACATTAAACATGAGGCAAGAAAAG |
| 1414 | NUSAP1 | 3590394 | TCTTGTGATGAGACTGAGATACAGATCAGCAACCAGGAAGAA |
| | | | GCTGAGAGACAGCCACTTGGCCATGTCACCAAAACAAGGAGA |
| | | | AGGTGCAAGACTGTCCGTGTGGACCCTGACTCACAG |
| 1415 | NUSAP1 | 3590395 | AACTGAAAATAAACCACCTATGCCAAAATTGGCATACTTTTATG |
| | | | GAGATTTCTTTT |
| 1416 | NUSAP1 | 3590396 | AAATAAGTAATCCCACTGAATTCCAG |
| 1417 | NUSAP1 | 3590397 | TCAGAGCTACTGCAAAAGTTCCTTCTCCACCAGACGAGCACCA |
| | | | AGAAGCT |
| 1418 | NUSAP1 | 3590398 | ACAGAGATTCAAAGGTACCTTCAGAA |
| 1419 | NUSAP1 | 3590399 | CCATTGATCAATATATTGAGAGAAA |
| 1420 | NUSAP1 | 3590400 | CAGCCCATCAATAAGGGAGGGGTCAG |
| 1421 | NUSAP1 | 3590401 | TGTGGCTTCTACTCCCATCAGCCAACGACGCTCGCAAGGCCG |
| | | | GTCTTGTGGCCCTGCAAGTCAGAGTACCTTGGGTCTG |
| 1422 | NUSAP1 | 3590402 | CTAAAGATAATGAGCATAAGCGTTCACTGACCAAGACTCCAGC |
| | | | CAGAAAGTCTGCACATGTGACCGTGTCTG |
| 1423 | NUSAP1 | 3590403 | TGCTTGGGACACACAAATTAAAGACCATCACGGGGAATTCTGC |
| 1424 | NUSAP1 | 3590404 | CCCATTCAAGTTGACAACTGAGGCAACGCAGACTCCAGTCTC |
| | | | CAATAAGAAACCAGTGTTTGATCTTAAAGCAAGTTTGTCTCGTC |
| | | | CC |
| 1425 | NUSAP1 | 3590405 | ACCATGGGGGCAATCTAAAGAAAATAATTATCTAAATCAACAT |
| | | | GTCAACAGAATTA |
| 1426 | NUSAP1 | 3590406 | AGCAACGGAAGAAACGCGAGCAAGAACGAAAGGAGAAGAAAG |
| | | | CAAAGGTTTTGGGAATGCGAAGGGGCCTCATTTTGGCTGAAG |
| | | | AT |
| 1427 | NUSAP1 | 3590407 | CCCACTTTAGTCACGAGATCTTTTTCTGCTAACTGTTCATAGTC |
| | | | TGTGTAGTGTCCATGGGTTCTTCATGTGCTATGATCTCTGAAA |
| | | | AGACGTTATCACCTTAAAGCTCAAATTCTTTGGGATGGTTTTTA |
| | | | CTTAAGTCCATTAACAATTCAGGTTTCTAACGAGACCCATCCTA |
| | | | AAATTCTGTTTCTAGATTTTTAATGTCAAGTTCCCAAGTTCCCC |
| | | | CTGCTGGTTCTAATATTAACAGAACTGCAGTCTTCTGCTAGCC |
| | | | AATAGCATTTACCTGATGGCAGCTAGTTATGCAAGCTTCAGGA |
| | | | GAATTTGAACAATAACAAGAATAGGGTAAGCTGGGATAGAAAG |
| | | | GCCACCTCTTCACTCTCTATAGAATATAGTAACCTTTATGAAAC |
| | | | GGGGCCATATAGTTTGGTTATGACATCAATATTTTACCTAGGT |
| | | | GAAATTGTTTAGGCTTATGTACCTTCGTTCAAATA |
| 1428 | NUSAP1 | 3590408 | TACATAGCCCTATCGAAATGCGAGGATTAATGCTTTAATGCTTT |
| | | | TAGAGACAGGGTCTCACTGTGTTGCCCAGGCTGGTCTCAAAC |
| | | | TCCACCAAATGTACTTCTTATTCATTTTATGGAAAAGACTAGGC |
| | | | TTTGCTTAGTATCATGTCCATGTTTCCTTCACCTCAGTGGAGCT |
| | | | TCTGAGTTTTA |
| 1429 | NUSAP1 | 3590410 | ATGGCCGCTTCAGACCCACAGCAAAGATTTTTGATAAGGCATG |
| | | | ACTCCTAAACGGATGAATGAGTGCCCCATTAGAGCCAAGATTC |
| | | | TTTTAT |
| 1430 | NUSAP1 | 3590411 | CTTGAATCCGTGAGGCAGATGTAGTGAGCAGAG |
| 1431 | NUSAP1 | 3590413 | TAGCCAAAGTCTAAGCAGAAGCCCCTGCGACCATTCCAACACT |
| | | | GACAGAACATTCCTCTGCCTTGTTTTACGGATACATTGGGGAA |
| | | | ACTTAAGGATGAGAACTTTAGAAATGGTATTTCTTGGAAACCC |
| | | | ACTTGCTTGTAAATCAGTGGT |
| 1432 | NUSAP1 | 3590415 | TGGTATCTGGTGTTAAGGCAGTGCCGAATGGAGGGCAGGAAA |
| | | | CACATTTTTAAATATTTATGGATTTATGTATTTTTCTCATAAAGA |
| | | | CAGGGTCTCCCTATGATTCCCAGGCTCTCCTTGAACGCCTAG |
| | | | GCTCAAGTGATCCTCCCACCTCAGCCTCCCAAAGTGCTGGGA |
| | | | TTACAGGTGTGAGCCACCAGATTATATTTATTTCTATTCGCTGT |
| | | | ATTTAATTCTTAACCCCATGTTTATTTTACATAACTTCCCTATTT |
| | | | CTCAAAAAGAATTTAAGGCCTATTCTCAAAATAATG |
| 1433 | NUSAP1 | 3590417 | TTATGAACCATTAAGACAAATTAGACCAGGCATG |
| 1434 | NUSAP1 | 3590419 | CCCAGGGCACCTACATATCCAGATAGACATAAATTCCTCACTC |
| | | | CTAAGAAAACCAGGCTTACAAGGCGTCAAGGCCCTATAAAGA |
| | | | GGAAAAACCCAGGACGGTCCTTAGAGGCTTCCTTCAGCATGA |
| | | | AAACCAAGTTAAAGCCAGAGCTCATCCTGGGTTGCAGCAAGT |
| | | | CATGGTTGGGCCCA |
| 1435 | FBXL8 | 3665216 | GCTGCTTCCCGTCCGCTGTCCTCTGC |
| 1436 | FBXL8 | 3665217 | GGGCAAAGCCCATCTGGTCCGCCGAGCAG |
| 1437 | FBXL8 | 3665218 | ACAGCTGCCAGACTTCGGTAAATCAAGGGGGCGCCCCCTGGA |
| | | | GACCAGAATTTTCTGGTACCCCTGGGGATCCGGCTTCAAGATC |
| | | | GCTGCTACCAGTGGGCACTCAAAACGGGGTGCCCATGGGTCC |
| | | | CAGGTACAAGCCCGGCCGAACGTATCTGAAGCCCCAGGAAAC |
| | | | ACGTGGCACAAATTCCGGGAGAAACTGTTAGCCCGGAAGATA |
| 1438 | FBXL8 | 3665219 | AGCATTTGTACACCTAAGCTCGGTCTTCCTGCAACACTTTGCG |
| | | | CCTTCCCGACCTCAGAGACGTCCGTCTC |
| 1439 | FBXL8 | 3665220 | AGCTATTGGGAGTGGCGGATCCTCCCACCCC |
| 1440 | FBXL8 | 3665221 | TGGCACTCATCTTCCGCCACCTGTCCCTGAGAGACCGTGCTG |
| | | | CCGCCGCCAGGGTCTGCAGGGCCTGGGCCGCCGCTGCTACC |
| | | | TGCAGCGCCGTGTGG |
| 1441 | FBXL8 | 3665222 | ACTTCCCACGGGTCACTCAGCTAGGGAATGGCAGAGGCAGAA |
| | | | TTCGAACCTAGCAGTCCGGAGGCCATGCCAAGACTCCTTAGA |
| | | | GACAGCTGAGAAAGCCCAGTTCCTAAAATATCATTGGCTCTCC |
| | | | ATGTCCAGGTTTCATCCTGTGGCAGACGCCACTGAAATCTTCT |
| | | | AAAAGGATAGGATGCGAGTTCCCTCCTTTGGGGCAACA |
| 1442 | FBXL8 | 3665223 | AGGCCTTTTCTGCACGGCTCTAACC |
| 1443 | FBXL8 | 3665224 | AGTGCCGCGGAGAAAAACCGCTCTTCGACGCGGGCCGCGAC |
| | | | GTCCTGGAGGCTGTGCACGCTGTATGCGGGGCGGCCAGCCA |
| | | | GCTACGCCACCTCGACCTGCGGCGCTTGTCCTTCACACTGGA |
| | | | CGACGCGCTGGTGCTGCAGGCGGCGCGCAGCTGTCCCGAGC |
| | | | TCCACAGCCTTTTTCTGGACAACAGTACCCTAGTGGGCAGCGT |
| | | | GGGTCCCGGCTCAGTGCTCGAGCTACTGGAGGCCTGCCCGC |
| | | | GCCTGCGCGCTCTCGGCCTGCACCTAGCCAGTTTGTCGCACG |
| | | | CCATCCTCGAAGCA |
| 1444 | FBXL8 | 3665225 | GCGCCCCGAGTGCTAGTGCCTTCTTTTGGGATTGTTGCCCCC |
| | | | CGGGTCTTTACCGAGTTGGGAACTGTGATGGCATCGGGACCA |
| | | | GTCCTGGGCGCCCTGAGACCACTCGCTGCTCT |
| 1445 | FBXL8 | 3665226 | ACACTGCCCCCCTCTCTTGCCTCCA |
| 1446 | FBXL8 | 3665227 | GTGAGTGTGAAATAAACAAATCCTGCAGTG |
| 1447 | ARL6IPIP2 | 3683039 | TGACTTCCTTACTATTGCTTCCTGGACTAA |
| 1448 | XPO6 | 3686340 | ATGGGCCTTGGTCACACTCCTTGGCTTCTCCCACCGCAAGCA |
| | | | ACGCTGCCTGCCTCTGCCGCTCCTCCACATCTTGCCGCTGCC |
| | | | CAGCAGAGCTGGCTTCTGGGTCCACCTGAGCACTGGACGGTG |
| | | | CTCCCAGGGCGTTGGAGCAGGCGGAGGGGTGTGTGGCCAGG |
| | | | TACTAGGAGGCACCAGGAAATCCCGCGGGGTGGCCCATGCA |
| | | | GACCAGGCGCACGTGGCTCATGGGGCAGAATTGCCAAGGAC |
| | | | AGCTCACGACAGTGCCACCTT |
| 1449 | XPO6 | 3686341 | AATGTGCACAGGCTGGTCAACGACCTGCGCTACTACAGACTC |
| | | | TGCAACGACAGCCTGC |
| 1450 | XPO6 | 3686342 | TTAGTCTCAGCCATGGAGGTCCCGAGTTCCTGGCTCTGCAGC |
| | | | CCCTCCATTTGTCTTGGCATCTTTGTTCATACCCAGGACCCTG |
| | | | CCGTTCTCCCTCCTGGGTGATGAGCCCCGGTGGGGCCAGCAT |
| | | | TGGAGTGTGCCCAGGCTTGCATTCAGGCTGAGATGGTTGGTG |
| | | | CTTGGGAGCTGCACTTCTGGGTCCCCAGGGTTAGAGGTGGGA |
| | | | CCCAGGTTCCCCGGCTGTCTTGGGCTCTTTCCAGACCAGCCC |
| | | | CAGCTCAGCTTGGGCTGAGTTGCTGCCAGGTCCTGGGAGGAG |
| | | | CCCTCCTAGTACTCACCCTCTTGTCCCACTGCTGCCACCTGTG |
| | | | CAGGGACTGTCAGGTGGGCTGTCCCCACCCGTGCAGCACCTC |
| | | | GGTGGGAGCTGGGTGCTGCTGGCTCTTGGTGTCCATGAGGC |
| | | | CATCTTGTTGGAGCCTGACAGTGCCTGGGACCTCCTTCCCCAT |
| | | | GGGGCTCACCTGTTCTCTTCTTCCTGTGTCAGGTGACCAGGC |
| | | | CTCTCTCTTGCCTGATAGGAACTTCTGGGAACTTTTCCTTGTAC |
| | | | CGTTTTATACTTGATGAAATTAGGAAAAGAAATCGCTTTCTCCC |
| | | | TGGTCCTCTTGGGGTTCTTGACCTGAGTCCTCTGTGAAGCAGC |
| | | | TTGTCCACGGCTCCACCGTAGTGCTCAGATGCACACACTGCT |
| | | | CTCACTGGTGCAAACCTGGCCGCCTGCTTTCCTCATTTGCCAC |
| | | | GTGTGGCAGGGAAGCTTTTGCTTAGACTCATCCTGTTCTCCTT |
| | | | TGTCTTGGGGTCTTCCTTTTCTTGGGACTTGTTCTCTCCTAAGC |
| | | | CTCTTCCAGTTCACTTCAGCCCCTGGATATGTTTTTTCCTTTTT |
| | | | CTAGAGGCCAGATCCTAATACTTAATGATCAGCTTCTAACGAC |
| | | | ATCAATATCAGTCAACTTTTTGATTTAAAGCTGTGGTTTCAAAA |
| | | | TCTAGTTATAGGCCAGGCGCGGTGTCTCACACCTGTAATCTCA |
| | | | GCACTTTGGGAGGCCAAGGCGGGCGGATCACTTGAGGTTAG |
| | | | GGGGTTTGAGACCAGCCTGGCCAACATGGCGAAACCCTGTCT |
| | | | CTACTAAAAATAAAAAAAATTAGTCAGGTGTGGTGGCACACGC |
| | | | CTGTAATCCCAGCTGCTTGGGAGGCTGAGGCACAAGAATCTC |
| | | | TTGAACCCGGGAGGCAGAGGTTGCAGTGAGCGGAGGTTGTG |
| | | | CCACTGCACTCCAGCCTGGGCGGCAGAGTGGGACTTTGTCTC |
| | | | AAAAAAAAAAATCTAGTTATATCAGAAGCACCTGGGGTACTTAT |
| | | | TAAAAATGGAGAAACAGACTTCTGTGTTCTACCCAGGAAATTC |
| | | | TGGTTTGGCATTTGGGAGCCACTGATTTAAAAGACATCCCTTA |
| | | | GTTGGTTTTTTGAGGGTAAAATAAAAGAATCACCACCTTCCATT |
| | | | CAGTCACGCACTGTGTGTTTGAAGCCAGCTGCTTCTCAAGCCC |
| | | | CGGGCCAGGAACTGGGGCACCAGTCCCAGCCTTCACCAAGT |
| | | | CTTTCATGGTAGACAGGCCAATACAGCACCCTCTGTGGACCA |
| | | | CATAGTGCCAAGCATGTGACATGTCTTGGCTCGAGTAAGCCTT |
| | | | CTAACAAGCCTCTGAAGTGTGGGTCCTGTTACTCCCCCATTTC |
| | | | ACAGATGGTGGGGGCTCAGAAGGTGAGCAGTTCACAGAACTT |
| | | | GGAAGTGGTAGAGCTGCGAAGCAGGAGGCAGACCTGGGTGT |
| | | | TCTGGCCCCAGAGCCTGCACACACTCCCCAGAAGCAGATTGC |
| | | | TCAGGACAGAGGCGCTGAGCTGGCTGCTGGGGCCAGGAAAT |
| | | | AGGAGGCATCTGTGCAGACTTTGGGAAGAGGCAGGCTTTGAA |
| | | | TGGAGTTCTGGAAGAGGAATAGTGGTTGGGCAGGAAAATGAA |
| | | | CTTGGTCCTGCTCATGGCTCTGCTGGGGCTTGCTGGGCCTGT |
| | | | TTGAGTCCTCACCGGGACCTACACTGAAAAAAAAAGCAGGGT |
| | | | CTCACCGTGTGCATGATGGCGGAGGTCAGGGCCTCACTTCTG |
| | | | GCCCAGGGCCTTCCATGGCCCACGCTGCGCCCAGTGGGACA |
| | | | GGCCTTGGGACTGTGTTTGCTGCTGCTCGGGTGGCTCTCGAG |
| | | | GGGCAGGGGCGGCCTGGAGCCCCGTGGGTAAAGGTTCTGCA |
| | | | GACATTGCTCGGTGTGCGCGTCACCTCAAGGGGCCATGGTGA |
| | | | AGAAGAGGGCTGTCACCACAGCCATGTCTGCGTTTGAGGGGC |
| | | | CGGACTCAGGAGCAAGTGTGCTGGTCTCTTCAGTGTGAGCTG |
| | | | GGGCCAGCTTCTTCATGGTGCAGCGCTTTGGTCTTTCTGTCCT |
| | | | TAGACTAGTGGTTCTGGTAGGGCTTGGTGGCAGCCTTGTGGT |
| | | | GAGGACTCAGTGAGTTGATGTCTGTATGTTGATTGCAGCAGTG |
| | | | TCTGGCACCCGAGAGGCCCTAGGGACGTATTCCTCTTG |
| 1451 | XPO6 | 3686343 | AGGTCCTGGTCCACAAGTCCCATGATCTTCTGCAGGAGGAGA |
| | | | TTGGCATCGCCATCTACAACATGGCCTCAGTCGACTTTGATGG |
| | | | CTTCTTTGCCGCCTTCCTCCCAGAGTTCCTGACCAGCTGTGAT |
| | | | GGTGTGGATGCCAACCAGAAAAGTGTGCTGGGG |
| 1452 | XPO6 | 3686344 | GTCCTTTCTCCAGCCCGACATCCACCTTTTTAAACAAAATCTCT |
| | | | TCTACTTGGAGACTCTCAACACCAAGCAGA |
| 1453 | XPO6 | 3686345 | ACAGGACTGAGCTTCTGTGCCTGGACTGAACTAGTAACTTTTA |
| | | | CACCCAGGAATTCCAAAGCAGTTTAAAAATACTTTGCTTAGCC |
| | | | CCCAGGCAGAGGCTTAACCTCCAGG |
| 1454 | XPO6 | 3686346 | GCCGAGCTGTTTGAGCTCCTTTTCCGGACGCTCCATCACAACT |
| | | | GGAGGTACTTCTTCAAGTCCACCGTGCTGGCCAGTG |
| 1455 | XPO6 | 3686347 | GAGCAGTTAGCCGAGAGCATCCTCCACGAGGGCAGCACAGG |
| | | | CTGCCGGGTGGTGGAGAAGTTTCTGAAGATCCTGCAGGTGGT |
| | | | GGTCCAGGAGCCAGGCCAGGTGTTCAAGCCCTTCCTCCCCAG |
| | | | CATCATCGCCCTGTGCATGGAGCA |
| 1456 | XPO6 | 3686348 | ACTGATGAGATGCTGAGCTTCTTCCTCACTCTGTTTCGAGGCC |
| | | | TTAGAGTACAGATGGGTGTGCCTTTCACTGAGCAAATCATACA |
| | | | GACTTTC |
| 1457 | XPO6 | 3686349 | ACCAGACACTCAGCGTCTTAGAAGATATTGTGGAGAATATCTC |
| | | | GGGGGAGTCCACCAAGTCTCGACAGATTTGCTACCAGTCGCT |
| | | | GCAGGAATC |
| 1458 | XPO6 | 3686350 | CATTTTTGAAGCGTCCAGGCCTGTTTTCTTGTCATATGTCTCCT |
| | | | AGTCTTGTTTTGCCTGATTGTTTCCATAGGTTGTGGTGTAGTG |
| | | | GTGCATGTTCGTGTTCGCATTTCCTCTTGCATTGCTTCTGTTTG |
| | | | TCCCATCCTTGGTGATGCTCAGTCTGGATGCCTGTTGGGAGTA |
| | | | GGGCCTGCCAGTCTGTCCATTGGGAAGGTGCTTGGCAGGTGT |
| | | | AATTGCTCAGGACTGTAGAGAAAGTGGGCGAGGTCAAGAGTT |
| | | | GGACTTGGGTCTGAATGGCTCCAGCTC |
| 1459 | XPO6 | 3686351 | AGCAGTGGCCCGTGCGCTCCATCAACCACGCCAGCCTCATCT |
| | | | CTGCACTCTCCCGGGACTATCGCAACCTGAAGC |
| 1460 | XPO6 | 3686352 | CCAGGTGTTGGTGTGCCGAGCCCTCTCTAACATCTTGCTGCTT |
| | | | CCGTGGCCAAACCTTC |
| 1461 | XPO6 | 3686353 | AGCTGCTGCTATCTGCGTGCCACTTACTGGTCTCACTGGCCAC |
| | | | CACCGTGCGGCCCGTCTTTCTGATCAGCATCCCTGCAGTGCA |
| | | | GAAAGTATTCAACAGAATCACTGATGCCTCTGCCCTGCGACTT |
| | | | GTCGATAA |
| 1462 | XPO6 | 3686354 | GGGCAAAATGCTATGAAACGGCACCGCATGCTCCAGAGAAAT |
| | | | ATTTCATGAAAGGAAGTCAATCGATGCAGCAAACTTCATTGTT |
| | | | GTCTTATTTTAAGTAATTGCCACAGCCACCCCAACTTTGAGCAA |
| | | | CCACCACCCTGTTCAGTCAGCAGCAGTCACTTTCAAGGAAGA |
| | | | CCCTTCACCAGCAAAAAGATTACCGCTCTGAAGGCTCAGATGA |
| | | | TTGTTAGCATTTTTAGCAATAAACTACTTTTTAACTAAGATATGT |
| | | | ACATTGTTTTCTTAGACATAATGCTTATTGCACACTTTATAGACT |
| | | | ATAGTGTAAACAAAACATATGCATTGGGAAACAAAAAAATTAGT |
| | | | GTGCCTTGCGTTATTGCATAATTTGCTTTATTGTGGTGGTCTG |
| | | | GAGCTGAACCTGCAGTATCTCTGAGGTATGCCTGTATATCCTT |
| | | | CCAGACTTTTTTCTCTTTTTATGTAATAAGTAATAACTAAGTTTG |
| | | | TAGATAGCTGGAGATA |
| 1463 | XPO6 | 3686355 | GTTGTAGCCTACATGCATTCAGATACAACTTTACTTTTTTAGTT |
| | | | ATCTGAGTTCCACATGAATACATGCTCACTG |
| 1464 | XPO6 | 3686356 | GGCTTACTCTCACTGGTTAGCACAGTATTGCAGTGAAGTTCAC |
| | | | CGGCAGAACACGCAGCAGTTCGTGACACTCATCTCTACTACC |
| | | | ATGGATGCAATCACAC |
| 1465 | XPO6 | 3686357 | GAGGACCTTTTGCAGATCCAGATCTTAATTTTTTTAAAAGCATG |
| | | | TCCTACAATCTGGATTTGTCTAATTATTTCCATTATATTAGATTC |
| | | | AGTTTAAACATTTTTAGCAAGGTTACTACATAGGCAATGATGTG |
| | | | CCTTTCCTCTTGCATCATGTCAGAAGGCTCTTAATATCAA |
| 1466 | XPO6 | 3686358 | TTTCAGCCTTGAGGAGCTCTACAGATGTGCTAGATTGACTGAA |
| | | | ATTCTTACTCCTAAGGCTGACTTTGATGTCCTTTCTCTT |
| 1467 | XPO6 | 3686359 | TCAAAGTCACTCTGTACGGATCTCAGATAAAATTGTACAACATT |
| | | | GAAACTGCTGTGCCATCAGTATTGAAACC |
| 1468 | XPO6 | 3686360 | GATATATCTTATCTGTTCAGTTGGCGGGGCGCA |
| 1469 | XPO6 | 3686361 | AACATCACGGCGGAGAACGACTGCCGGCGGCTGCACTGCTC |
| | | | CCTGAGAGACTTGAGCTCCCTGCTGCAGGCCGTGGGCCGCCT |
| | | | GGCCGAGTACTTTATCGGGGA |
| 1470 | XPO6 | 3686362 | TTTGAAGAAGTTGTGTTGAAAAGTAAGGAAATTTCAGA |
| 1471 | XPO6 | 3686363 | GCCTGTGTAAATGGGCGCCAGCCGCGATTCTTGTCTACTCCT |
| | | | GGTGCTGTGACCGTGTATGACAATGGGATGCACATTTTGGCC |
| | | | AGC |
| 1472 | XPO6 | 3686364 | CTTCTTATGGGATCTGTCCCGGCTCTG |
| 1473 | XPO6 | 3686365 | TTTAAAGGCTTATGATGAAAAGCTGTGGGGGAG |
| 1474 | XPO6 | 3686366 | TGTTCTTCAGGACAATTTAGAAGTTTATTTGGGATTACAACAGT |
| | | | TTATAGTCACTTCAGGGTCAG |
| 1475 | XPO6 | 3686368 | TCCTGCTCACAGAGGTGTTGAATCGAATCCAGTTCAGATACAA |
| | | | CCAAGCCCAGCTG |
| 1476 | XPO6 | 3686369 | TTGTTTGGATATCTGGACGCTGTTTTTGGACTATCT |
| 1477 | XPO6 | 3686371 | GTGGTTAATGGAATGAAGGGTTGCCTGTCCTGTAG |
| 1478 | XPO6 | 3686372 | AGCCTTCTAGACTTGCCAGATTGAAATGACACAGTGATCTGCC |
| | | | CATCAACTTTTTATCATTTCCCTTCACTTTAATTGGGTCACAAC |
| | | | ACAAATGACTTAGAAAATGTGAGCGCACTAGATTATAAGAAGC |
| | | | CTTAGCAGACAGTGTCTGAGGATTAAAGTTGC |
| 1479 | XPO6 | 3686373 | CAGGAGCAACATGGGACATTTTATTTCCGGGCCAGTTTTGCTT |
| | | | TTCTGAGTAGTAGTTTTCTCTGCTTTTATTATTTCACATATCTCT |
| | | | GTTTTGAAAAATAGCTTTTGCAGTAATGAGCTTCAGAATTGCTT |
| | | | TTAGCCATTATTTCATTTTCAGCTAAGGCCTAGTATGTCTTTAC |
| | | | CTT |
| 1480 | XPO6 | 3686374 | AAAACCGTGATGTTTGCTCTGTATAAGAACACAATCTGATATG |
| | | | GTAATATGTTCTTAAAAATTATTTGGTGATAGCTTTCCATATGAA |
| | | | TTCAAAGGCATCATTATTCACACTTTCATATTCTTTCTGTCTGT |
| | | | GGTTAAGAAAGGCTGTATTACCTTTTTTTTAATGATCTGTGTGT |
| | | | CTCATGTCTATCTCTTCATATGTTAATTTAAAAATCTAGCTGCTT |
| | | | GTATCAACTATCAAATATCAGTTGTTTTGACTTTAATCATAATGT |
| | | | AGTCACAGACAACTTTGTTGTGGCTTCCATTTGGATGGTATAG |
| | | | AAATGTCATTATGGATTGTCTATGTACTGATGTTGTTACGTGTA |
| | | | ACTTTTGTGCTCTTGGTTTTACATTTTAATCCTGTGCTTCCTATT |
| | | | GCCCTGTGAAAGCTGAGAGGTGCCTGGGAGCAGAAAGGTGA |
| | | | CATAAATAATGCTGTGTGCTTGCTTCCTGGCTCTGGGTCCCCT |
| | | | ACCACTAATTCTAAACAGCTCAGTCCATTCTCAGTTGTTTAGGA |
| | | | GCTGCTAACCAGATCCTTGGCTTCTCTTTCCCTCTACTGCCTTT |
| | | | TCCCCTAACTTTCTACTGTTCATTAGCACCTGTACCAGAAGG |
| 1481 | XPO6 | 3686375 | TTGTTATTGTCCTCTCAAGTGGAGCCTACAATGACCTACTTTTT |
| | | | TTTTTTTTTAAAAGCACTCTAAAAGACGACTCCATCACAGTACT |
| | | | CTGAGGCAGGGTTTCATGATTTATGTCTCTTGCAGATGAGGTC |
| | | | ATTTATGTATCTTACAACTGCTGCTGTATGAAAACAGGAGGGA |
| | | | ATTTGGAAACTTATATTATGAACAATCAGATTGACGGTTTAGGG |
| | | | ACTTTC |
| 1482 | XPO6 | 3686376 | GAGACTGCTGCTCCTGCGTAGCCAAGAACAGG |
| 1483 | XPO6 | 3686377 | ACAGAAAGGTAGGTGTGTGCCAGTAAGTCTGAGATTAGCTGG |
| | | | AAGGGCTTGGGTGGTTAAGGGAAGTGACTGAGTTTGAAAAAT |
| | | | GCTTGTGCCTTGTGTAGGTTTGTTGTCTT |
| 1484 | XPO6 | 3686378 | TGCTGTGCTGCATGGCATCTGTAATCCTCTTT |
| 1485 | XPO6 | 3686379 | ATCAATGAACTCATGTCCAAGAACTGTGT |
| 1486 | XPO6 | 3686380 | AGCTAGCGCACCCTCTTAATTCCTACGTCTGTTTAGTCTTGAG |
| | | | TCTCTATGTAATTTGATGCCAGTGTGTCCTTTTGCTACAGCTTC |
| | | | TCCATTCCTTAATTCTTTATTTTGATTTATCTCTTTATCTGTGTG |
| | | | GTTTCTTTGTCTGTTATCCTCCTTGAGAA |
| 1487 | XPO6 | 3686381 | GGAGGGTTGAAGTGGGAGAATGGCTT |
| 1488 | XPO6 | 3686383 | GTCTTTTCTGTTTGATGAGAGCCTCATGACAAGGTGTAAAGGG |
| | | | TAAGAATAAACAGAAAGCAAACCACAACATGAGACAGGAAGGT |
| | | | AGGAGGAGAGGGGAGTGCCCTGGGTGACTGGGGTGGCTGCT |
| | | | GTGTGCTGCTGTGATACCTGTTTGCTAGGGAGACATGTATGCA |
| | | | ATGCCTGGCCGTGAGGCCCTGAGGGTGCCGGGAGCCTGGGC |
| | | | TTGCTACTTGAGGGAATCTTGTAGTGAAAAGAAGTTTTTATCTC |
| | | | TAACTCCTTTATCCAGGCTTCTTCTTGGATGTCTAGGAACTTTC |
| | | | TTTATATCTCCAGTTTAGTGCTTGGCATGTGGTGGGCACTTAA |
| | | | AGTTGGCTGAAAGAACCATTGATTTAAAGTAAACTTGGGTTAG |
| | | | TGCAATGGCTC |
| 1489 | XPO6 | 3686385 | TAGACCATCTCTGGATTACTTCTAATA |
| 1490 | XPO6 | 3686386 | ATGGAAATCCGTAGCTGTCTGCCCAAACTCCTTTTGGCTCACC |
| | | | ATAAAACCTTACCTTACTTTATCCGGAACAAGCTCTGCA |
| 1491 | XPO6 | 3686390 | GCCTCTCTCAGGGCATTGGAAAGTCTGATGACAGAATTTTTTC |
| | | | ACGATTGTACAA |
| 1492 | XPO6 | 3686391 | GAGTGATTTATCTGATTGGTACACCAGGGA |
| 1493 | XPO6 | 3686392 | TCTCAAGCTTCATCCGTGTGGTGGCGTGTGTCAGAGCTTCCTT |
| | | | C |
| 1494 | XPO6 | 3686393 | AGTGGAGTCATGAAGTATTTGGCCTGTTGTGACTGCCTTATTT |
| | | | CACA |
| 1495 | XPO6 | 3686394 | GGCCTGTCAGCCTCCGCCCGTTCAGCCTCGGGGCCGGGGCC |
| | | | GCCGCCACCTCTGCCCGCGGAGGCCGGGGAGCCCCTGCCTG |
| | | | GGCCCGCAGCCTCCCCCGCGGGGGTCGGGCCCGGGCGGGG |
| | | | GTCCCGAGCAGCTGCCCTCCTCGCCGGCATCCGAGCCTCATT |
| | | | TCCTGCTTTTTCAGTTTCCTTGGGGAGGGGCGGGTGGGTCTG |
| | | | GATGAATTGTCTCGGGGTCCCCCGATGAGGCGACCCGGGCG |
| | | | GCCCTGCCCTTTTTAGAGGGTCCCCTCGGGGCCCGGTGGGG |
| | | | AAGGGGTTGTCTTTGCATGGGTGGGGGACTTCCCGAGTCTGC |
| | | | CGGGACCATGACCTGAACTGTGCGAGCGGGACGTGTCCGAA |
| | | | GCCCAAGA |
| 1496 | XPO6 | 3686396 | TGCTTTGTGATAGGGAGAGTTATTTCTAAGGGAAAGGAATGTA |
| | | | CCCTGTATTTCTTTCTTTTTCTTTTTTTTTTTTTTTTTTTTTGAGA |
| | | | CAGAGTCTTGCTCTCTTGCCCAGGCTGGAATACAGTGGGGTG |
| | | | ATCTTGGCTCACTGCAACCTTTGCCTCCTGGGTTCAAGTGATC |
| | | | CTCCTGCCTCAGCCTCCTGAGTAGCTGGGACTATAGGCGCCT |
| | | | GCCACCACACCCGGCTAATTTTTGTATTTTTAGTAGAGATGGA |
| | | | GTTTCACCATGTTGGCCAGGTTGGTCTCGAACTGCTGACCTCA |
| | | | AGTGATAAAGTGCTGGGATTACAGGCATGAGCCACCACGCCC |
| | | | AGCCCGTACCCTGTATTTCTTGAAGTGAAGAATATAAAGTCTG |
| | | | TA |
| 1497 | XPO6 | 3686397 | TCACAGCTCATAGTGACCTCGATCTCCTGGTC |
| 1498 | XPO6 | 3686399 | TGCAGAGATTACCTATGTTACAGGCTTAAATTATAGATGTGAA |
| | | | GATGGTAAAGGGAGACACTATTTTAATCAAAAGCTTCCTGGGT |
| | | | ACAAAGCTAATGAGAGGAAAAATTATACATTTTATCAAGCTCTT |
| | | | TTTCAAGTAAAGAATAGCTTTCTTTTTTCATCTGGCTTCTTGCC |
| | | | TGACCTTCTCCCCTTCCCCTAAATGGTGAGAGGAAGGAGAGC |
| | | | TTGCAGATAGATTTTCCATATCGTAGGGGATTTTTATATCTGGG |
| | | | AAGCACAGCATTTCATATTTATAGGAGGGTGTATATTGCCAAAT |
| | | | GGGATATTTGGCATTACGAGTCATTTCCAGCTGAGAGAGTAAG |
| | | | GATGCA |
| 1499 | XPO6 | 3686401 | TCCCTGGCGTTCTGTCCAATACACTTGCCTTCAATCCAAGTTG |
| | | | AGGACGGTTATGGTAACCCTCTCCAAGGCTCTCTTAAGTGGG |
| | | | CGTCAGGGAAGCCCACTGGAGACAGGAAAGACCAAGAGGGT |
| | | | TGGGAGTCTAAGTGAACCTATTCCTGGGTTGGTTAGTGGTGC |
| | | | GTCCTGTGACAAGAAGAGAGGGACCTTGAGACGGAGAGTCAC |
| | | | AGGCCTGATGATAGCAGGTAAGGTGGAGCCACAGTTCCACCG |
| | | | CTGGGATTGGTCCCTTTGATGAAGAACAGAACGTTTCCTGGCT |
| | | | ACATTTGAAGTATAATTATTTGTAACAAAAGATGGATTTGGAAG |
| | | | AGAGCACTTTTAGGTGAAGGGCTTCTGGAGGTTTAAAAAGGCT |
| | | | AATTGTCCACTGTTCTCCACCACCTCCCGCTTTCAACCCCTTC |
| | | | AGTATTGACTCCTTTAACCTCATGTAGCTTTCGTGACTTTGAAA |
| | | | CACCATGTAGTAGAAGGAGCCAGAC |
| 1500 | XPO6 | 3686403 | TAAATTTTAGCCTTTCTGGTAGATGTGTAGCACTATCTTATTTTA |
| | | | AATTTGTATTTTCCTGATAACTAATGAGGCTGAACACTTATTTAT |
| | | | AGGCTTTTTGAATA |
| 1501 | XPO6 | 3686405 | GGATGTAACTGCTAGGCCACCTTCAGTTCTTTGAAGTTAGGGA |
| | | | CCGTCTTACTCATCATTGTATCCCAGGGGCTTAATTTAAGCAAT |
| | | | ATCAGTTACTTAGTGAGTATTGAATTCTCATTTCTCCAACAAAT |
| | | | AGCTGAGTTGCTTAGTCACTCCAGAATTAAAGCTAGGTTTAGA |
| | | | ATAATTGGAGCGGTGTGATGGCATGTGCCTATAGTCTCAGCTT |
| | | | CTCAGGAGGCTGAAGTGGGGAGGATCGCCTGAGCCCAGGGG |
| | | | TTTGAGGCTGCAGTGAGCTGTGATTGTTCCACTGCACTCCAGT |
| | | | CTGGGGTGATACAGCAACACTCTG |
| 1502 | XPO6 | 3686407 | CTCCCACATGACTATGGTACAGTTACCATCTTCGGTTAATAGA |
| | | | ACATTGATTCAGTACTTTGATCTAACCTACTACCACCTGTATTC |
| | | | CAGTTTTGTCAATTGGCTCAGTCATGCCTTTCATAGCATTTTTT |
| | | | CCCTCCAGTCCAGGATCAATCTGTGGTCAGGTGTAGCATTTAC |
| | | | TT |
| 1503 | XPO6 | 3686409 | TGCAGCATGCTTTTATAGTGGTTCGTCAGTTTCATACTCATTCA |
| | | | TTACCTGATG |
| 1504 | XPO6 | 3686411 | ATGGTGTGTGTGAAGACATGGAACTGTTATGTGGAGAGAAA |
| 1505 | RP13- | 3716787 | ACAGTTGGTGTTACGTTAGAGCTAATAATTATACTTTAGCACGT |
| | 753N3.3 | | TAACCTCAGAATTCTAAGGCTGAGAGTCAAACACTGCTAATTC |
| | | | ATAGAAGGCAATAGCTTGTAATAATGAATCATAAAGCTCTTCTA |
| | | | CTCTTTGTAGTTCAGTAGATAAAAACATCTGTCTGTAGTGAACT |
| | | | ATTTTATCTGATGGGAAGAACACCCGAGGATCCGCCTTCAGTA |
| | | | TAGAATCGAAGAGAAACTGCTTCACTAGCTCTTTTCCACTAGT |
| | | | CCGGGAGTCACCAATCATCA |
| 1506 | TOP2A | 3756154 | TGAAATTGAATTAAGTTTAAGGCTGGGTG |
| 1507 | TOP2A | 3756155 | GGCTGTTCCAAAACAGTAAGTTATCTCTATTGATTGT |
| 1508 | TOP2A | 3756156 | GGAACTAAGCATGGTGGGAAATGTTCCTGCT |
| 1509 | TOP2A | 3756194 | CTGGATTGCAGAAGACTCGGGGACAACATTTGATCCAAGATCT |
| | | | TAAATGTTATATTGATAACCATGCTCAGCAATGAGCTATTAGAT |
| | | | TCATTTTGGGAAATCTCCATAATTTCAATTTGTAAACTTTGTTAA |
| | | | GACCTGTCTACATTGTTATATGTG |
| 1510 | TOP2A | 3756195 | AGTGACCATCTCATGGGCATTGTTTTCTTCTCTGCTTTGTCTGT |
| | | | GTTTTGAGTCTGCTTTCTTTTGTCTTTAAAACCTGATTTTTAAGT |
| | | | TCTTCTGAACTGTAGAAATAGCTATCTGATCACTTCAGCGTAAA |
| | | | GCAGTGTGTTTATTAACCATCCACTAAGCTAAAACTAGAGCAG |
| | | | TTTGATTTAAAAGTGTCACTCTTCCTCCTTTTCTACTTTCAGTAG |
| | | | ATATGAGATAGAGCATAATTATCTGTTTTATCTTAGTTTTATACA |
| | | | TAATTTACCATCAGATAGAACTTTATGGTTCTAGTACAGATACT |
| | | | CTACTACACTCAGCCTCTTATGTGCCAAGTTTTTCTTTAAGCAA |
| | | | TGAGAAATTGCTCATGTTCTTCATCTTCTCAAATCATCAGAGGC |
| | | | CGAAGAAAAACACTTTGGCTGTGTCTATAACTTG |
| 1511 | TOP2A | 3756196 | CAAGGGGGAGAGTGATGACTTCCATATGGACTTTGACTCAGC |
| | | | TGTGGCTCCTCGGGCAAAATCTGTACGGGCAAAGAAACCTAT |
| | | | A |
| 1512 | TOP2A | 3756197 | CTGGTGTCTCTCAAAAGCCTGATCCTGCCAAAACCAAGAATCG |
| | | | CCGCAAAAGGAAGCCATCCACTTCTGATGATTCTGACTCTAAT |
| | | | TTTGAGAAAATTGTTTCGAAAGCAGTCACAAGCAAG |
| 1513 | TOP2A | 3756198 | AGTTCCTAAAAAGAATGTGACAGTGAAGAA |
| 1514 | TOP2A | 3756199 | GGCAGTGTACCACTGTCTTCAAGCCCTCCTGCTACACATTTCC |
| | | | CAG |
| 1515 | TOP2A | 3756200 | TTAGTAACAAAGAACTGAAACCACAGAAAAGTGTCGTGTCAG |
| 1516 | TOP2A | 3756201 | TGATGAAGATTTTGTCCCATCAGAT |
| 1517 | TOP2A | 3756202 | ACAAACTACATTGGCATTTAAGCCAATCAAAAAAGGAAAGAAG |
| | | | AGAAATCCCTGGTCTGATTCAGAATCAGATAGGAGCAGTGAC |
| | | | GAAAGTAATTTTGATGTCCCTCCACGAGA |
| 1518 | TOP2A | 3756203 | AAAATACTGAAGGAAGCCCTCAAGAAGATGGTGTGGAACTAG |
| | | | AAGGCCTAAAACAAAGATTAG |
| 1519 | TOP2A | 3756204 | AACAAGATGAACAAGTCGGACTTCCTGGGAAAGGGGGGAAGG |
| | | | CCAAGGGGAAAAAAACACAAATGGCTGAAGTTTTGCCTTCTCC |
| | | | GCGTGGTCAAAGAGTCATTCCACGAATAACCATAGAAATGAA |
| 1520 | TOP2A | 3756205 | GAACAAGAGCTGGACACATTAAAAAGAAAGAGTCCATCAGATT |
| | | | TGTGGAAAG |
| 1521 | TOP2A | 3756206 | TGACTCCGTAACAGATTCTGGACCAACCTTCAACTATCTTCTTG |
| | | | ATATGCCCCTTTGGTATTTAACC |
| 1522 | TOP2A | 3756207 | AATGAAGAGAGTGACAACGAAAAGGAAA |
| 1523 | TOP2A | 3756208 | ATTAATTAAAGTTCTGATTCAGAGGGGATATGATTCGGATCCT |
| | | | GTGAAGGC |
| 1524 | TOP2A | 3756209 | GCTTTTTGACCACGTAGGCTGTTTAAAGAAATATGACACGGTG |
| | | | TTGGATATTCTAAGAGACTTTTTTGAACTCAGACTTAAATATTAT |
| | | | GGATTAAGAAAAGAATGGCTCCTAGGAATGCTTGGTGCTGAAT |
| | | | CTGCTAAACTGAATAATCAGGCTCGCTTTATCTTAGAGA |
| 1525 | TOP2A | 3756210 | CCTCCTCTCATAACAGACTATAGGGAATACCATACAGATACCA |
| | | | CTGTGAAATTTGTTGTGAAGATGACTGAAGAAAAACTGGCAGA |
| | | | GGCAGAGAGAGTTGGACTACACAAAGTCTTCAAACTCCAAACT |
| | | | AG |
| 1526 | TOP2A | 3756211 | TCAAGGGTACTATTGAAGAACTGGCTCCAAATCAATATGTGAT |
| | | | TAGTGGTGAAGTAGCTATTCTTAATTCTACAACCATTGAAATCT |
| | | | CAGAGCTTCCCGTCAGAACATGGA |
| 1527 | TOP2A | 3756212 | GGCTCGATTGTTATTTCCACCAAAAGATGATCACACGTTGAAG |
| | | | TTTTTATATGATGACAACCAGCGTGTTGAGCCTGAATGGTACA |
| | | | TTCCTATTATTCCCATGGTGCTGATAAATGGTGCTGAAGGAAT |
| | | | CGGTACTGGGTGGTCCTGCAAAATCCCCAACTTTGATGTGCGT |
| | | | GAAATTG |
| 1528 | TOP2A | 3756213 | GACCATTATCAATTTGGCTCAGAATTTTGTGGGTAGCAATAATC |
| | | | TAAACCTCTTGCAGCCCATTGGTCAGTTTGGTACCAGGCTACA |
| | | | TGGTGGCAAGGATTCTGCTAGTCCACGATA |
| 1529 | TOP2A | 3756214 | TGTTTACTTGCTTCAAACGGAATGACAAGCGAGAAGTAAAGGT |
| | | | TGCCCAATTAGCTG |
| 1530 | TOP2A | 3756215 | TCTGACATATAATGACTTCATCAACAAGGAACTTATCTTGTTCT |
| | | | CAAATTCTGATAACGAGAGATCTATCCCTTCTATGGTGGATG |
| 1531 | TOP2A | 3756216 | AACAGATAGATGATCGAAAGGAATGGTTAACTAATTTCATGGA |
| | | | GGATAGAAGACAACGAAAGTTACTTGGGCTTCCTG |
| 1532 | TOP2A | 3756217 | CCAGCACATCAAAGGAAGCTAAAGAATACTTTGCAGATATGAA |
| | | | AAGACATCGTATCCAGTTCAAATATTCTGGT |
| 1533 | TOP2A | 3756218 | GAAGAGTGGAAGAGTTCTACTCCAAAT |
| 1534 | TOP2A | 3756219 | TGGCCCTCTCTTCTGCGACATCGTTTTCTGGAGGAATT |
| 1535 | TOP2A | 3756220 | AATATCATCAAGATTGTGGGTCTTCAGTACAAGAAAAACTATGA |
| | | | AGATGAAGATTCATTGAAGACGCTTCGTTATGGGAA |
| 1536 | TOP2A | 3756221 | TGGGAGAGACAAATATGGGGTTTTCCCTCTTAGAGGAAAAATA |
| | | | CTCAATGTTCGAGAAGCTTCTCATAAGCAG |
| 1537 | TOP2A | 3756222 | CTCCACTGAGTGTACGCTTATCCTGACTGAGGGAGATTCAGCC |
| | | | AAAACTTTGGCT |
| 1538 | TOP2A | 3756223 | CATTGGCTGTGGTATTGTAGAAAGCATACTAAACTGGGTGAAG |
| | | | TTTAAGGCCCAAGTCCAGTTAAACAAGAAGTGTTCAGCTGTAA |
| | | | AACATAATAGAATCAAGGGAATTCCCAAACTCGA |
| 1539 | TOP2A | 3756224 | TGTAAATGCCTTAATTGAAAACCCAACCTTTGACTCTCAGACAA |
| | | | AAGAAAACATGACTTTACAACCCAAGAG |
| 1540 | TOP2A | 3756225 | GCTGATCAGATTGTGACTAAACTTGTTGATGTTGTGAAGAAGA |
| | | | AGAACAAGGGTGGTGTTGCAGTAAAAGCACATCAG |
| 1541 | TOP2A | 3756226 | AAAGGATTTCGTAGTTATGTGGACATGTATTTGAAGGACAAGT |
| | | | TGGATGAAACTGGTAACTCCTTGAAAGTAATACATGAACAAGT |
| | | | AAACCACAGGTGGGAAGTGTGTTTAACTATGAGTGAAAAAGGC |
| | | | TTTCAGCAAATTAGCTTTGTC |
| 1542 | TOP2A | 3756227 | TATACATGTATCACCTTTCAGCCTGATTTGTCTAAGTTTAAAAT |
| | | | GCAAAGCCTGGACAAAGATATTGTTGCACTAATGGTCAGAAGA |
| | | | GCATATGATATTGCTGGATCCACCAAAGATGTC |
| 1543 | TOP2A | 3756228 | TGGCTATGGAGCCAAATTGTGTAACATATTCAGTACCAAATTTA |
| | | | C |
| 1544 | TOP2A | 3756229 | TGAAAAGATGTATGTCCCAGCTCTCATATTTGGACAGCTCCTA |
| | | | ACTTCTAGTAACTATG |
| 1545 | TOP2A | 3756230 | TAATGCTGCGGACAACAAACAAAGGGACCCAAAAATGTCTTGT |
| | | | ATTAGAGTCACAATTGATCC |
| 1546 | TOP2A | 3756231 | CAAATGTGGGTTTACGATGAAGATGTTGGCATTAACTATAGGG |
| | | | AAGTCACTTTTGTTCCTGGTTTGTACA |
| 1547 | TOP2A | 3756232 | GAACATATTTTGCTCCGCCCAGACACCTACATTGGTTCTGTGG |
| | | | AATTAGTGACCCAG |
| 1548 | TOP2A | 3756233 | CCTGTAAATGAAAATATGCAAGTCAACAAAATAAAG |
| 1549 | TOP2A | 3756234 | GTTCTTGAGCCCCTTCACGACCGTCACC |
| 1550 | TOP2A | 3756235 | TTCAAGTGGAGCTCTCCTAACCGACGCGCGTCTGTGGAGAAG |
| | | | CGGCTTGGTCGGGGGTGGTCTCGTGGGGTCCTGCCTGTTTAG |
| | | | TCGCTTTCAG |
| 1551 | TOP2A | 3756237 | TTAAATAGGAATTCATACCAGGGACAAAGCAG |
| 1552 | TOP2A | 3756239 | GGTCACTTATACACGCATTTCTTTAAAATATCTGATTAGGTATT |
| | | | TATAGTTTGAAAGAGATGATGTTTCCTTGACTGAGCATCTTGAG |
| | | | AAATCAAGATTTAGTTGACAATTAGACATGAGGAGAATAGAGA |
| | | | GCTAGAAGACCTTGCATAAACTGATTGACCAAGAGAATAGATA |
| | | | CACTAATCATGTCTACAGGAACAGAAAATAAAAGAGACAGAGA |
| | | | AGAGATAATAAATCTGATGGTAAAAAAAAAAAAAGGCAGGAAG |
| | | | ATTACGAATGGCTTCTACTCTCTGGGTGTGGTGGCGCATGCCT |
| | | | GTAATCTCAGCACTTGAGCTGGGGAGGTCAAGGCTGCAGTGA |
| | | | GCCTAGGTAGTGCCACTGCACTCCAGCCTGGACACAAGAGTG |
| | | | AGAGAGACCCTGTCTCCAAAAAAAAATGATTTGATCATATATGA |
| | | | TTTGACTGCCCCCTTGTGGTAATTTACATTTGTCAATGGTTTAG |
| | | | GGAGACTTGCCTGTATACCGGGATATACAAATTTATGCAAGCA |
| | | | CGAAGACAGTTTA |
| 1553 | TOP2A | 3756241 | ATCGGCCCGTTTCCTATTATGGAAGATTTAGGTCATTTCCATGT |
| | | | TATAAATAATATTGAGGTGATTATTTTGGAGTATAAAACAAGAA |
| | | | TGTTTATATTATGATCTATTACCTAACAAATAATTTTGCTCATTA |
| | | | TATAGTAAATTGTGTTTTATCACAAGGCTATAAACAGCATGTTC |
| 1554 | TOP2A | 3756243 | GCTCATTTGTATTCTAGATTTCTGATAGATCCCTTCTTCCCTAA |
| | | | TATGATCCCTAATATGAATCTTC |
| 1555 | TOP2A | 3756245 | AAATAAAGCATGAGTACATTTTTAGTGGCTTAATATCAACTTCT |
| | | | ATTGCAG |
| 1556 | TOP2A | 3756247 | CTTAAATTATTAATCATGATTTATCTTTACATATATGTGTTCTTAT |
| | | | TGT |
| 1557 | KRT15 | 3757079 | TTGCATGCGCTCTATTCCCCCTCTGCCTCTCCCCACCTTCTTT |
| | | | GGAGCAAGGAGATGCAGCTGTATTGTGTAACAAGCTCATTTGT |
| | | | ACAGTGT |
| 1558 | KRT15 | 3757080 | GTGTCTATTGCAGGAGAAACGTCCCTTGCCACTCCCCACTCTC |
| | | | ATCAGGCCAAGTGGAGGACTGGCCAGAGGGCCTGCACATGC |
| | | | AAACTCCAGTCCCTGCCTTCAGAGAGCTGAAAAGGGTCCCTC |
| | | | GGT |
| 1559 | KRT15 | 3757081 | GTGGTTTCTTCCCACAAGAGAGAAATCTAA |
| 1560 | KRT15 | 3757082 | CAATTTCCACATCAATGTAGAAGAGTCAGTGGA |
| 1561 | KRT15 | 3757083 | TTGAGTAGGCTTCATTCAGGGCATGTCTCTCCCCCAGGCCCC |
| | | | ATCTTCATACACTTCCGCTAAGATGCCCACAATTCATCCCCCTT |
| | | | CATGTGCAGCTTGAAAAACCCTGACATTGTTGCTCCCTGCCGG |
| | | | GCATACCTGCCATTGCCACTGCCCATCTCTGTGATGAGGAATT |
| | | | CAACACCAGATCTCTGGCAGCTCTTGAGGGATTGGCCAGTGG |
| | | | CCATTCTCAGGGGTGCTGTCTAGTTTTCC |
| 1562 | KRT15 | 3757084 | GATGGCTGGCATTGCCATCAGGGAAG |
| 1563 | KRT15 | 3757085 | AGGATCTGGACTCCTCACTCTGGTCCTTGGCTGTTACCTGGGA |
| | | | CAGGTCACTTCCTCTCTCTGGATCCGTGTTTCTTCTGTAAATGA |
| | | | TAGAGGCTGGGCTAGTGGTAGTTAAGATCTAGTGCTCATTCCA |
| | | | TTCTCTGCATGAGATAGATGGGTATTCTTGTAGTTCAGAATCTT |
| | | | GACCAGCTCAGTGGCTCATGCCTGTAATCCCAGCACTTTGGG |
| | | | AGTCCAAGGCGGGTGGATCACTTGAGGTCAGGAGTTCGAGAC |
| | | | CAGCATGGCCAATATGGTGAAACCCCGTCTCTACTAAAAATAC |
| | | | AAAAATTAGCTGGGCGTGGTGGCGGGTGCCTGTAATCCCAGC |
| | | | TACTCGGGAGGCTGAGGCACAAGAATCACTTGAACCCGGGAG |
| | | | GCGGAGGTTTCAGTGGGCTGAGATCGTGCCACTGCACTCCAG |
| | | | CCTGGGCGACAGAGTGAGATTCCGTCTCAAAAAACAAAACAAA |
| | | | ACAAAACAAAATCTGTCTACTTGGGGATAGCAGGCCTGGATG |
| | | | GGCTAGCAGGATGTCCCACCCCTAGAGGAGTCAGATGTGTGG |
| | | | GTGGTGGTGGTGTAGGGTCTGAAGAACACTGCATAGCTATCT |
| | | | ACATGAGCTTCCCTTACGGACACTTGAGCTTGTGCCCTTTGCT |
| | | | TAAATC |
| 1564 | KRT15 | 3757086 | AGAGTGCCGCTATGCCACGCAGCTGCAGCAGATCCAGGGGC |
| | | | TCATTGGTGGCCTGGAGGCCCAGCTGAGTGAGCTCCGATGCG |
| | | | AGATGGAGGCTCAGAACCAGGAGTACAAGATGCTGCTTGACA |
| | | | TAAAGACACGGCTGG |
| 1565 | KRT15 | 3757087 | CCTGATGTGTCTATGCATCTGTCACTCCCCCA |
| 1566 | KRT15 | 3757088 | AGAGGTGGCCTCCAACACAGAAATGATCCAGACCAGCAAGAC |
| | | | GGAGATCACAGACCTGAGACGCACGATGCAGGAGCTG |
| 1567 | KRT15 | 3757089 | CTGGCCGGCCAGGTCAATGTGGAGATGGACGCAGCACCGGG |
| | | | TGTGGACCTGACCCGTGTGCTGGCAGAGATGAGGGAGCAGTA |
| | | | CGAGGCCATGGCGGAGAAGAACCGCCGGGATGTCGAGGCCT |
| 1568 | KRT15 | 3757090 | GTGAGAGCTGGCCCCCATCACCCCTGA |
| 1569 | KRT15 | 3757091 | TGACATCAACGGCTTGCGCCGAGTCCTGGATGAGC |
| 1570 | KRT15 | 3757092 | CTCCTCTTCCTGCATTGCCCACTTTACTTGGCCTTCTCCTGGC |
| | | | TCTGACTCAGGCAGCCAAGACCCCTCCCACTTCC |
| 1571 | KRT15 | 3757093 | ACCATCGACAACTCCCGGGTCATCCTGGAGATCG |
| 1572 | KRT15 | 3757094 | GTTCTGTAGATCCATGGCTGTGTCCAAGGTGTGCAGGAGGCA |
| | | | GTGACCATGAGTTGTCCACAGTGGGGCTGGTGGAGTGTCTCT |
| | | | GAGAGAGCTATTGTCAGAGCTGGCTGCACCCCACTGCCCCAC |
| | | | TCTCCTGGGCAACCAATTCCCACAGGCAATACTGCCTCCTTGG |
| | | | TCTTTCGTGCCCTGGAGA |
| 1573 | KRT15 | 3757095 | GTGAGTCCTCGGATGTCAAAGAGAGG |
| 1574 | KRT15 | 3757096 | CAACCAGCCCAGAATGCGACTACAGCCAATACT |
| 1575 | KRT15 | 3757098 | CTCTGGCAATGAGAAAATTACCATGC |
| 1576 | KRT15 | 3757099 | GTTTGTCTCTTCAGGGTCAGGAGGAGGATATGGGGGTGGCAT |
| | | | GAGGGTCTGTGGCTTTGGTGGAGGGGCTGGTAGTGTTTTC |
| 1577 | KRT15 | 3757100 | GGTGGAAGCCGAAGTATCTCAGCTTCTTCTGC |
| 1578 | KRT15 | 3757101 | GAGGTCCCACAACACCCTCTGAAGGGTATATAAGGAGCCCCA |
| | | | GCGTGCAGCCTGGCCTGGTACCTCCTGCCAGCATCTCTTGGG |
| | | | TTTGCTGAGAACTCACGGGCTCCAGCTACCTG |
| 1579 | KRT15 | 3757102 | GATCGGCCAGTGGACTCCCAAACTAAGAACACGGAGCTGTCC |
| | | | TCTTGGGGAGAGGCTCAGGGCTCGGGGAAGTGAAGTCCAGC |
| | | | TGAGGGCACAGTTGGCCTGAGCTGCTCTCAGTACAGGCAGAG |
| | | | GCCTTGGTAGCTGTGCTGTGATGAGAGTTCGCTCCCTGCTGC |
| | | | TCTCTTCTGGCATGGAGAGATGAACCTGTAATCCAAGTGTTAA |
| | | | AACCGTGCCCTG |
| 1580 | KRT15 | 3757103 | CCCAGCCTTATCAGCGGAGGTTTGCCCCAACACATCCCAGAA |
| | | | ACGAGCAAAGGTTCAGCGCCGTGCAGTTGGCAGGTGTCGGG |
| | | | ATCATCAGTCATCCCCTTGTCAGTCCCAAGCCTGCTGGGCTTT |
| | | | TGTGAGGGTGCCAGGAACACAGGCTGGAGGATGGCAGGAGG |
| | | | GGAGTAGAGGTGGGAGGAGGGGAGTCCATCTGCAGCACCAG |
| | | | GTAAGGGGATGGATGCTGGCTCCTCTGGTCACCTCAGCTGGA |
| | | | ACACTACTCAAGGTC |
| 1581 | KRT15 | 3757104 | GACAGAGCTTTATCTTCGCAAGGCCATCCCACCTGGTGCTAAT |
| | | | GAGGAGGCTCCGGGCCCCACCCAGATCTGGAGCTCACAGTA |
| | | | GCGGTTTGGACTGAAACCAGGGATTTGTGCGTGGGGCAGTGA |
| | | | GGGGGGCAGCTGCCGCCCCTGGCCTGGGCCTGAGAGTATAG |
| | | | AGAAAGCCACCTCGAGGGGCTGCTGGAGGAGAGTCAGGTGC |
| | | | AGAAGGGGATCTGGCTGGGGTCCAGCCCTTCCTCACCCTGGG |
| | | | GTGAAAGGCGAGTAATTGTTCTTGAGTTAATTGCTGGGGCCAC |
| | | | AATGTCTGCAGAGGCTTTTAATGAGCTCTGGATGATCTGAGTT |
| | | | TGATTATTTTTCTTTCGGAGGAAAAGACAATACCCTCCCACCCA |
| | | | TGAGACAATACCACACTGTCTGTGCCCAGCATTGGAGGCCAG |
| | | | GCTCACTGCGAAGATGGATGAGAAGGAACCCACCCCCAGCCT |
| | | | TGCTGGCTGGCAGTTCCCCTTGCCAGCCCAGCTCAGATGCAG |
| | | | GAATTTGGGGTCTGCAGGAAGGACTCTTTCCCTGTGCCCTGTT |
| | | | TGGTTGAGGGTGTGAGGACCTGTTTGAGTCCTGGCTTTGCCC |
| | | | CTTACCAGTGGTGCCACCTGGCACAAGTTGCTTCACCTCTCCA |
| | | | AGTTTCAATTTCATTCTTTCTGAATCTTGGGTGGGGGTCACCCT |
| | | | CTGTTGTGAGGATGAGAGGAGGTGATGGATGCAAAAGTGCTT |
| | | | TGTAAATCACAAAGTGCAGGGTAGAAGTAAAGGATTATGCTAT |
| | | | TATAGCAAAATAAGAACCTAAGAACAACCTGCGTTGCCCCATA |
| | | | GGAGCTGGCTATGGAAGGTCGATGCCGTTGAGCCTAAGAACA |
| | | | TGCTCAGGCTCACAGGGCATGTTCTGATGCCCAACGACAAAG |
| | | | CCCCTCCTGGTGAGGGCACTCAGGCGCAGGTGCCGGTCATG |
| | | | CACCCTGGCCCCTGCATGTCTGGCACCTGGGTGGGGATCCAG |
| | | | GAGGGGGCAGGATGGGGGCTCTTGGGCCACAGGGCTTCCCT |
| | | | GGAAGTGAGAGTTGAGAGCGCCCCTTGCCACAGGGAAACAGA |
| | | | GACTTAAAAAGGTAAATGTCCACAGTCTTACCATGGTAATTGG |
| | | | TAGGGTCAGGATTTGAACCCAGGCCTCACAGTCTTACCATGAT |
| | | | AATTGATAAAGCCAGGATTCAAACCCGGGCCTGAGGGACTCC |
| | | | AGAGCCCTGTCCACTTCACCATGCTGCAACCTGGGCTAGGAA |
| | | | TCCTCCTCCTGAGTTTCTGTAAGCCCTGGGGCCAGGTCCAGA |
| | | | GGGCTGAGCCACACCTCCAAGTGGCACTGCCCACAGGTATCA |
| | | | GGTGTCCCTGGAAAGGTGTCCCTGAGCTGGTGGCAGAGAAAA |
| | | | GGGCTCTCCTGAGTGTTCAACTC |
| 1582 | KRT15 | 3757105 | GCAGGCCCAACCCTATGAGTGATGGGGGCAAGTGAGGGACA |
| | | | CTAGTTCCACGCCCGCATGCTGCCAAATGTACTCAGCACCCT |
| | | | GCTAAGGAGGCTGGAGACCCCATCACGGCCATGGCAATCCC |
| | | | GAAGGAGGAGCTGTTTCAAGGTTGGTTATGAACATGTAACCCC |
| | | | AGAGCCCCGCTGCTGTAGCCTGGACTGGGACCCCCTTCTGCC |
| | | | CCCTCCCTAGCTGTCCTGTTCTGGCCTCCAGCACCCACAAAC |
| | | | CACCACCCCCAACTTAACTTCTCAGGAAGCCTTGGAGCTGGA |
| | | | GGGAGAGGCCTGGCTGCACCCCCAGCTGGGACTGCCCAGAG |
| | | | GCGCTTGTCCCTGCCCATGAAAGCCTCCCTTGTCACAGCTGA |
| | | | AACCTTCCCTCTGCCTCAGGGGCCCCTGGAATGTGGCTGCGG |
| | | | GGCGGGGTCTGGGCCCACACAGGTGGGGCAGGTGACTGTCA |
| | | | GGTCTCAGGCCTGAGTGTCAGGAATGAAGCCTGCCTTTGTGT |
| | | | GTGCACAGTGCAGGGTGGGGCTGGACTGGGGACACTTTTCTG |
| | | | TCTCAGCCTGGAGACCTGGGATAGGAGGGAGAGGGGAGTGG |
| | | | GGAAGTTGAGGGGAGTGCCTTTACATCCTGCTGGTCATCGTG |
| | | | GCCACTTCAGTCTGTTGAGCATTTCCTGTGAGTCATCTTGCTC |
| | | | CAACTGAGAGTCAGGCTGAGCTGGAGTTATTTCCATTTTCCTG |
| | | | ATTGGTAGACTAAGGCTCA |
| 1583 | TMEM100 | 3763391 | CGTCTTTGGTCAGGAACTTTATAATGTGCTAT |
| 1584 | TMEM100 | 3763392 | TTGCAGTTCCAAATTGCCATCTTCCCTTGTCTCATTTGCAAGTT |
| | | | CTCAATTGTATTTCTCTCAAATGGACAGGTTCCTTCTTTACTGG |
| | | | AGGATTTTTGTTTTTATCATATTGGTTTTTCATTACTTCTGAATA |
| | | | GTCTTAATTACGTTTACTAAATTCTAAAGGATTTCTGTGCTATTA |
| | | | TAATTAGG |
| 1585 | TMEM100 | 3763393 | ACCCTAAGGGCTACTTCTGAGACTGAAAAATCAGCTTTCTATTT |
| | | | ACATGAAACACTTTGGGGGTCATGGGAGTGCACAGCATTAGA |
| | | | CAGTATTTGGTTCACCCTGTAAAGTAGCCAAGAAAAGATGAGA |
| | | | AAAATCAAGATAGGCCTGGCACACTAGACATTTGCCTCCAAAA |
| | | | GAAATAACCTACAGTCTTAAGATGTATCATAAAAATGTTCTGCC |
| | | | AAGGATCTAAATTACCTTGGGTTTCGCATATGTCTATGA |
| 1586 | TMEM100 | 3763394 | GTTGTGATCACCACAGTCCCTCTGGTCAGTGAGATTCAGTTGA |
| | | | TGGCTGCTACAGGGGGTACCGAGCTCTCCTGCTACCGCTGCA |
| | | | TCATCCCCTTTGCTGTGGTTGTCTTCATCGCCGGCATCGTGGT |
| | | | CACCGCGGTGGCTTACAGCTTCAATTCCCATGGGTC |
| 1587 | TMEM100 | 3763395 | TGGTGAGACTGTCCAGATCTAGTCTGTAAACCCAGCTTAGAAG |
| | | | CACT |
| 1588 | TMEM100 | 3763396 | TTGGAAGATATTGTTACACTTCAGACCACAAATCCCCACCTCA |
| | | | TT |
| 1589 | TMEM100 | 3763397 | AATTTGGGGACAGATCTTGATTTTCAGGTTAGCTCAATCTCAG |
| | | | CTTTGG |
| 1590 | TMEM100 | 3763398 | AGAAGTTGGACGAAGAGGCTCAGGCGTTGCTGTTTCTTGTCTT |
| | | | CCAAGTCAAGTGGTTACTCTGGTAATG |
| 1591 | TMEM100 | 3763399 | ATCCCAAACCAGAGCAGACCCTATAGTAAAGTATTTTTACATCT |
| | | | TTTCCTTTCCCCAGAAGAGATCCCTAACCTATTGTTTTAT |
| 1592 | TMEM100 | 3763400 | GTTTGCACCTTTAGCTTTGGTAACAGGAAAGCATGCTTTTCAA |
| | | | CAGAATAAGGTGATATTCAGAGCTTCAGTGCAGTTATTGGGCT |
| | | | ATCTTGCAGGCAAAGTGGTACTAGAAAATAGAGGGGAATTGC |
| | | | CCTCAAGGGCC |
| 1593 | TMEM100 | 3763401 | ATGCTCCTCTTACCAAGCCTGCAACTTAAAACCTATGGTTTAAA |
| | | | CTGTGCTTTCAATTATCTGGAGGAGGCCAGCACTGATGAGCC |
| | | | CATCCTGAGCCAGTCATTTTAAGGCCAGTGCTACCTAACTGAG |
| | | | ACAAGGCTAATCTGGTC |
| 1594 | TMEM100 | 3763402 | CAGTTTATTATGGTATTGGACACCCCATGCTCCTTACTGCATTG |
| | | | GCTTTGGGTAAGAAGGAGTGAAAATTAGTGTGCGAACCTGAAA |
| | | | ACCTAGAATTTCTGATTGGGACTGA |
| 1595 | RPL31P57 | 3766793 | AAAATCTACAGTCGGTGTGAATGTGAACTAA |
| 1596 | RPL31P57 | 3766795 | AAAGAGCTCCGGAAACTTGCCCTGAAGGAGATGGGAACTCCA |
| | | | GATGCACACTTTGATACCAGGCTCAACAAAGCTGTCTGGGCC |
| | | | AAAGGAATAAGCAACGTCTCATACTGTATCCATGTTCGGTTGT |
| | | | CCAG |
| 1597 | HIF3A | 3836706 | ATGGCGCTGGGGCTGCAGCGCGCAAG |
| 1598 | HIF3A | 3836707 | GGGGTTTTATCTGGCCATGTTCCCATGGGACCCTGGAAAATGT |
| | | | TCTAGGTCCTCAGCTTTCC |
| 1599 | HIF3A | 3836708 | ATCTCACCGCCGTGCGCACCCACTCGTAACTCGCACCCGGGT |
| | | | CCTGGCTGCACCGCATCCCCTCCTGCACCCCCTGGATGGCCC |
| | | | TTCAGCCAACGGGGGCCTG |
| 1600 | HIF3A | 3836709 | CAAGGATGCTCTTGGGAAGTCCCTGGTGG |
| 1601 | HIF3A | 3836710 | GTACGGCTTGCAGCCCAGAGTGCCCAGTGAG |
| 1602 | HIF3A | 3836711 | TCAAGATGAGGAGCCAGTAGTGAGG |
| 1603 | HIF3A | 3836712 | CGCCACAGAGAGGAGCGAGGCGCCAGAGGCACC |
| 1604 | HIF3A | 3836713 | GTCGACCACGGAGCTGCGCAAGGAAAAGTCCC |
| 1605 | HIF3A | 3836714 | TGCTGTACCAGCTGGCTCACACGCTGCCCTTCGCCCGCGGCG |
| | | | TCAGCGCCCACCTGGACAAGGC |
| 1606 | HIF3A | 3836715 | ATGCGCCTCACCATCAGCTACCTGCGCATGCACCGCCTCTGC |
| | | | GCCG |
| 1607 | HIF3A | 3836716 | GGAATCCAGGCCACTAGGATGTACCCCCACTTCCTTGG |
| 1608 | HIF3A | 3836717 | ACCACTGGATGCCTGCTACCTGAAGGCCCTGGAGGGCTTCGT |
| | | | CATGGTGCTCACCGCCGAGGGAGACATGGCTTACCTGTCGGA |
| | | | GAATGTCAGCAA |
| 1609 | HIF3A | 3836718 | TTGGTATCTGTTCCTTTTCTCTGCCTCGTTACCCCACTCCTGGT |
| | | | A |
| 1610 | HIF3A | 3836719 | CTGGAGCTCATTGGACACAGCATCTTTGATTTCATCCACCCCT |
| | | | GTGAC |
| 1611 | HIF3A | 3836720 | GAGCTTCAGGACGCCCTGACCCCCCAGC |
| 1612 | HIF3A | 3836721 | GAGGCCCCCACGGAGCGGTGCTTCTCCTTGCGC |
| 1613 | HIF3A | 3836722 | ATGAAGAGTACACTCACCAGCCGCGGGCGCACCCTCAACCTC |
| | | | AAGGCGGCCACCTGG |
| 1614 | HIF3A | 3836723 | TGCTGAACTGCTCTGGACATATGAGGGCCTACAAGCCACCTG |
| | | | CGCAGACTTCTCCAGCTGGGAGCCCTGACTCAGAGCCCCCGC |
| | | | TGCAGTGCCTGGTGCTCATCTGCGAAGCCATCCCCCACCCAG |
| | | | GCAGCCTGGAGCCCCCACTGGGCCGAGGGGCCTTCCTCA |
| 1615 | HIF3A | 3836724 | CGCCACAGCCTGGACATGAAGTTCACCTACTGTGACGACAG |
| 1616 | HIF3A | 3836725 | AAGTGGCTGGCTATAGTCCCGATGACCTGATCGGCTGTTCCG |
| | | | CCTACGAGTACATCCACGCGCTGGACTCCGATG |
| 1617 | HIF3A | 3836726 | GTGCGAAGCCAGCTGCCACATGGCCCCCAGCTGACACCAGG |
| | | | ACCCCCCAG |
| 1618 | HIF3A | 3836727 | CCCAGGATGCACTGCCTCCCCACCTCAACACCAGCTCCCTGC |
| | | | TCCCCAAGCCCCAAGGAACTGTCTCCTTCCTTGCCCCCTCATA |
| | | | CCCAGTCCCCAGATATTTCTCTCCC |
| 1619 | HIF3A | 3836728 | CAGTAACAGGGCAGTATCGCTTCCTGGCCCGGAGTGGTGGCT |
| | | | ACCTGTGGACCCAGACCCAGGCCACAGTGGTGTCAGGGGGA |
| | | | CGGGGCCCCCAGTCGGAGAGTATCGTCTGTGTCCATTTTTTA |
| 1620 | HIF3A | 3836729 | TGGGCCTGATCTGCATGTGTGGACAGGTGTGTGTGTGTGTGT |
| | | | GTGTGTGTGCGTATGAGCATGCATGTGTATCATGCATAAGTGT |
| | | | ATGTGAGGGAGTGTGCACGTGTACACATATGAGGAATGTGTG |
| | | | TCACCATGTAAATGCCGGTGTGTGTGTCTGCATGGACACAGGT |
| | | | ATGTGTATGGGTGTGTAGACTGTTAATTTTTTTTTTTTTTTTTTT |
| | | | TTTTTTTTTTGCGTGAACCTCTGCTTAAGTG |
| 1621 | HIF3A | 3836730 | GCAAAGTGGTTAGGACCCATTCTCAAAAAAAAAAAAAAAAAAA |
| | | | AACCTGAAAACAGACCAAAAAAAAAAACCACACACACGCAAAG |
| | | | ATAGATGGTTTGCATATGGTAAATTCTCTTTATGGTACACAGTT |
| | | | CTGTGAATTTTTGACACACGCATGCAGTTG |
| 1622 | HIF3A | 3836731 | TGCACCCGGCCCATGTTGTGGTTTATATCAGTAGTTCCTTTGT |
| | | | AAATAGTGAACAGTATTCCATGGTATGAATAGAGCACAGGTTT |
| | | | TTTTTTTATCCATTCACCAGTTAGAAGACATTGGGCTGTTTCCA |
| | | | AGTTTGGGTGATTACAAAAAAACAGCTACTGTAAACATTCTCAT |
| | | | ACAAGATTTTATGAGATCACATGTTTTCATTTCTCTTGGGTAAA |
| | | | CAGCTAGGATTGGAATGGATGGGTTATATAGTAAGTGTATATT |
| | | | TAATCTAAGAAACTGCCATGGCTGGGCACAGTGGCTCACGCC |
| | | | TGTAATCCCAGCACTTTGGGAAGCCAAGGAAGGAGGATGACT |
| | | | AGAGCCTCTGAGGTGAAGACCAGCCTGGGCAAAGTGGTTAAG |
| | | | ACTCAACCGC |
| 1623 | HIF3A | 3836732 | GACAGAGTTTTGCCCTTGTCACTCAG |
| 1624 | HIF3A | 3836733 | TGAAACCCTTATAGGAGACAAATAAATGTGGGCAATTATTTTCT |
| | | | GCAAAATGCCCTCCAAGCCCCTGGGCGCCATTGCCTTCTGTA |
| | | | ATAGGACATCACC |
| 1625 | HIF3A | 3836734 | AAGAGACCGGAGTGGTGCTGTCCCTGGAGCAAACGGAGCAA |
| | | | CACTCTCGCAGACCCATTCAGCGGGGCGCCCCCTCTCAGAAG |
| | | | GACA |
| 1626 | HIF3A | 3836735 | CCCGGATCCTTGCCTTCCTGCACCCGCCTTCCCTGAGCGAGG |
| | | | CTGCCCTGGCCGCTGACCCCCGCCGTTTCTGCAGCCCTGACC |
| | | | TCCGTCGCCTCCTGGGACCCATCCTGGATGGGGCTTCAGTAG |
| | | | CAGCC |
| 1627 | HIF3A | 3836736 | TGCTCTCCTAATAATGCAACAATCGTCAACACAGAAGAAGACT |
| | | | TCTGTGACCAAATGTGGGCAGTTTTTCCCACACACCAAGCAGC |
| | | | GGACACCAGCTGGGTGTCCTCCAATTCAATTCCGGCATCATCT |
| | | | A |
| 1628 | HIF3A | 3836737 | CCAGATGAACTACCTGTGGGCACCGAGAATGTGCACAGACTC |
| | | | TTCACCTCCGGGAAAGACACTGAGG |
| 1629 | HIF3A | 3836738 | CAAACTCTCAGTCAGGGCTACAGTCATCTGGGGTTAGAGGGT |
| | | | TTTCTTCCAAGCTCACACACATGAGGTTGTTGGCAGGCCTCAA |
| | | | TCCCTCACTTTGCTTTGGCTGGAGGCCTCAGTTCCTCATCACG |
| | | | TGAACCTCTACATAGACTCCCTAAGTGTCCTCACAACATGGCA |
| | | | GTTGGCTTCCCTAAGGCAAA |
| 1630 | HIF3A | 3836739 | CCAGCTCAACGCCAGCGAGCAGCTACCCAGGGCCTACCACA |
| | | | GACCTCTGGGGGCTGTCCCCCGGCCCCGTGCTCGGAGCTTC |
| | | | CATG |
| 1631 | HIF3A | 3836740 | CCAGAGCTCAGAGGACGAGGACGAGGGAGTGGAGCTGCTGG |
| | | | GA |
| 1632 | HIF3A | 3836741 | CAGCCCAGAACACGAAAACTTTCTGCTC |
| 1633 | HIF3A | 3836742 | GGGATTCTCTGGCCCTCATTACCTAGCTGGCTTAAACCTACTG |
| | | | TTTTATA |
| 1634 | HIF3A | 3836743 | CTGGTTGAGGGTCATACAGAAAGTCAGTGGGCCAGCTGAGAC |
| | | | TAAAGCCTGATCT |
| 1635 | HIF3A | 3836744 | GTCCTCGGGCGAAGGAAGAAGGAGAAGGGGGATGAGGCCCT |
| | | | GGAGGAACACAA |
| 1636 | HIF3A | 3836745 | AGTTTCCTTCTGACAGGAGGACCAGCCCCAGG |
| 1637 | HIF3A | 3836746 | AGCACCCCACTCCTGAACCTGAATGAGCCCCTGG |
| 1638 | HIF3A | 3836747 | AAGTGTAACGGGGAAATAATGCATGCAAGGAAAAAGGTTTGG |
| | | | AGTAGGGGGATTTCAGTTTTAAACAGTATGATCAGGGTGGTTT |
| | | | CATTGAGAAGGT |
| 1639 | HIF3A | 3836748 | AGTGCGCTTCATTACGTCTGGCTAATTTTTTAATTTCTGTAGAG |
| | | | AAAGAGGTCTTGCTATGTTGCTCAGGCTGGTCTCAAACTCCTG |
| | | | GGCTCAAGTGATCCTCCTGCCTCAGCCTTCCAAAGTGCTGAG |
| | | | ATTGTGCCTGGCTGTCTCTGTCTTCTTTGGGGAAAAGCAAGGC |
| | | | CAATGTAGCTGAAGCAGAGAGGAGAGAAAGGTGAGGGCTGAC |
| | | | TGCATGGAGCCTCTGTGGGGCATTGTGATGGCTTTGAAGTCA |
| | | | CCTTGCTTGAGGAGGCTGCCTCAGGGCCTTTGCATATCCTGAT |
| | | | CCTTCTGCCTGGCATACTTTTCCCTCTGTTCTTTGCCATGTTAC |
| | | | CACATCCTTTAGATCTCAAACCAAATATTACTCCTTACACAAAG |
| | | | CCCTGCCTAACTTCATACGCTCATGGTTTATAACACTCCATAAT |
| | | | TACACAGGCCTTTGTGTCATAATTTGATGACTGTCTGTCTTCTC |
| | | | CTTTGGGTATGAGACCTTCAAGGGCAGGGGCCAGGGCTGTCT |
| | | | GGGTCCCTGCTGTTCTCTTCTTTGTGCACATGGGTGGGCGGT |
| | | | GGCTAAGCACAGAGGAAGTTCTCAGCACATATTTGTGAATGAG |
| | | | GAGCTAAGATTCACGCACTCGCACTGTGCCTAGCTTTGTGCTA |
| | | | AATCCTCTATGCACCTGATCCAATTGGCGCTTCTCACTGGAGT |
| | | | GTCGGTCCCATA |
| 1640 | HIF3A | 3836749 | GTTTTCACTTTGTCACCCAGTCTGG |
| 1641 | HIF3A | 3836750 | ACCACCACGCCCGACAGTAAATATGTTTTGAA |
| 1642 | HIF3A | 3836751 | CACAGCAAGTAAATAGCAATGCCTGGATTCAAACTAGGGCAG |
| | | | CATCTGACTCTGGACTCGGGTTCTTCACCGCAGCCCTGAACA |
| | | | CCCCAGAGAGGTTCAGAGAGCAGAACGTGCCCAAGACGTCAC |
| | | | TGCCGTTTGAATCCAGACAGGCTTGCCTCACCACCCAGG |
| 1643 | HIF3A | 3836752 | CTCACTGCTCTCTCCGTACTCAGACGAGGAC |
| 1644 | HIF3A | 3836753 | TGGTCTCAGCTCAGTGACCTCTGGGAGGTGGTCCCTGGCCCC |
| | | | CTCCTCCTTCTCTCAGGATTTCTCTTGGGGTTCTCAATACTTGG |
| | | | TTACCTCATTATCCCTTTCTCTGCCTCTCTTGGCTTTATTTTGG |
| | | | GGAATCAGGGGTGAGGAGGGTTGGGGGGGTCATATCTGTGTT |
| | | | TCCAGGTTCTGGGGAGAACAATGATCCACGGGTCAACGTGAT |
| | | | CACATTTC |
| 1645 | HIF3A | 3836754 | CCAGTGACTTCCGATTGAGGCCAAAGACCCCAAGCTGCCCGC |
| | | | CAGCTCTGACTGCCCCTTGCGCTCTGGGCTTCCTGCCGCCCC |
| | | | CAGCTTTGCCTGGACACTGA |
| 1646 | HIF3A | 3836755 | TGACCTGCACTGGTTCTAGACCACACAACCTCCAATGTGGTCT |
| | | | GCTTTAGATCACCTTCTTCTTCTTCCTTCTTCCTCTTCCTCTTC |
| | | | CTCCTGCTCCTCTTCCTCTTCTTCTTCTTTTTTTTTTTTGACAGA |
| | | | GTCTTGCTCTGTCACCCAGGCTGGAGTGCAGTGGCGCGATTT |
| | | | CAGCTTACTGCAGCCTCCGCGCCCTGGGTTCAAGTGATTCTC |
| | | | CTGCCTCAACTTCCCAAATAGCCGGGACTACGGGCATGTGCC |
| | | | ACATTGCCCGGCTAATTTTTGTATTTTTAGTAGAGATGGGGTTT |
| | | | CACCACGTTGTCCAGTCTGGTCTCGAACTCCTGACCTCAAGTG |
| | | | CTCCACCTGCCTCAGCCTTCCAAAGTGCTGGGATTACAGGCG |
| | | | TGAGCCACTGCACCCGGCTAGAACTCACTTTCTCCAAATCCCT |
| | | | CTGCTTCGAATTTCACCGTCTTCAGCTCTTTCTAGTTCTGGGC |
| | | | CTCACCAGCCTCTCATTCTGCCTGTTTTCAAACCTTACGATCC |
| | | | CCAAAAATTGTCTGGTTCTGGGCCTCTA |
| 1647 | HIF3A | 3836756 | CCGGTTCCAGATCTTATATTCAGTGATTTCCTCTGGTTCTGGA |
| | | | CCCCACAACTCCAAGCTTCCTATTGGTTCCAGTTCTCCTGATC |
| | | | GGTAATACATTTGGTTCCAAATCCAGACCTCTTAATCTCTCTCT |
| | | | TTTTTTTTTTTTTTTTTTGAGACAGAGTCCCACTCTGTCACCCA |
| | | | GGCTGGAGTACAGTGGCTCAATCTCGGCTCACTGCAGCCTCC |
| | | | ACCTCCTGGGTTCAAGCAATTCTTGGGCCTCAGCCTCCCAAAT |
| | | | AGCTGGGATTACAGGCATGTGCCACCACGCCCAGCTAAGTTT |
| | | | TATATTTTTAGTAGAGACAGTGTTTCACCATGTTGGCCAGGCT |
| | | | GGTCTTGAACTCCCGACCTCAACTGATCCACCCGCCTCAGCC |
| | | | TCCCAAAGTGCTGAAATTACAGGAGTGAGCCTGGCCAGACTT |
| | | | CTTAATTTCTAAATCACTTTTGTTTTAGACCTTATGAGGCTCAG |
| | | | CTTATTCTTCTGCAGTTCTCTATAACCAAGACTCATTTTCTCTC |
| | | | ATCAAAAACAAGTACAGAGAGTTTGATGTGTTTATCTCTTTTTT |
| | | | CTTCCTCTTCTTTTTTTTTTTTTTCTTTTTTGAGATGGAGTCTCT |
| | | | CTCTGTTGCCCAGGCTGGAGTATAATGGTGCCATCTAGGCTCA |
| | | | CTGCAACCTCCGCCTCCTGATTCAAGTGATTCTCCTGCCTCAG |
| | | | CCTCCTAAATTGGTGGGATTACAGGAGCCCACCACCACATCC |
| | | | GGCTACCTTTGTGTATTTTTTAGTAGAGACGGGGTTTTGCCAA |
| | | | GTTGGAGGGGCTGGTCTTGAACTCTTGACCTCAGATGATCCA |
| | | | CCCGCCTCAGCCTCCCAAAGTGCTGGGATTACAGGCATAAGC |
| | | | CACCGTGCCCGACCCTGTCCTTATCTTATAATAACCAGTTCTT |
| | | | CTAGAACCAGACGATGCTCTAGTTCTCCTAGATTCTGAACCTC |
| | | | ATGACCTGTACCACTCACTAGTTCCAGACTACACAACTTCTAG |
| | | | AAGGTGCCACCTCCAGGGTCCTGATTCAAGATCTGGTGATCT |
| | | | GCTGTTTCTCTGGTTCTAGAACTGACTTACAAGTGCCTTCTGAT |
| | | | TCTAGACCTCATTCCGTAAGTTCCCTTG |
| 1648 | HIF3A | 3836757 | CCCAGCCTCCTAAATCTATTCTGGGCTTCCC |
| 1649 | HIF3A | 3836758 | CACTGAACTTACCCAATTCCTTCTTTCAGTCTTAAGTTTTCCCA |
| | | | TTCTAAACCCCTACCCTCTAGGCTGTGCTGCTCCTGGACTTCA |
| | | | TGCCTCTCCATTCTCATTGCCTACAATCTCTGTGCCCCAGAAC |
| | | | CCCCTCCACTTCCCACCCCAGCCCTCCAGACATGCACTTACCT |
| | | | TGACTTTACCCCACATGTTTGGGGCACCTGGGGC |
| 1650 | HIF3A | 3836759 | AGCTGTCTGCCACCATCTATGTGCCTCCCTTACCCCCCAGCTT |
| | | | TCTTTCTACAGATGGTGCTACTCTTGGTCTCCCACAGGAAAAG |
| | | | GCCTCCCCCCTTCTTAGCCCCATTTACCCCGTTTGTGGAAGGC |
| | | | ACTGCTCGCTCTGTTTTGTCAGAGAGTGGCCTATCCAGATTGG |
| | | | TGCTA |
| 1651 | TPX2 | 3881448 | TCCTCCCGGAGTTTGGAACGGCTGAAGTTCACCTTCCAGCCC |
| | | | CTAGCGCCGTTCGCGCCGCTAGGCCTGGCTTCTGAGGCGGTT |
| | | | GCGGTGCTCGGTCGCCGCCTAGGCGGGGCAGGGTGCGAGCA |
| | | | GGGGCTTCGGGCCACGCTTCTCTTGGCGACAGGATTTTGCTG |
| | | | TGAAGTCCGTCCGGGAAACGGAGGAAAAAAAGAGTTGCGGGA |
| | | | GGCTGTCGGCTAATAAC |
| 1652 | TPX2 | 3881449 | ATGCCCTCAGGAAGTGTGGCGTTTGATGGAGGAAAACAGA |
| 1653 | TPX2 | 3881450 | TGAGGGAGTTCAAGAGCCAGTTTGTGTTTCTGTGCTTCACAAA |
| | | | GCCACCCTTGTCTAATTCTTGA |
| 1654 | TPX2 | 3881451 | TGATACATATTTGCCAGACTTCAAGATTTCAGAAAAGGGGTGA |
| | | | AAGAGAAGATTGCAACTTTGAGTCAGACCTGTAGGCCTGATAG |
| | | | ACTGATTAAACC |
| 1655 | TPX2 | 3881452 | GAGTGTGCACTTCAGTGGCGTGATC |
| 1656 | TPX2 | 3881453 | CATTTGGGTAAGTTAATAGTCAATTTATAGGCCACGTAAATGG |
| | | | GAAGGATTATTTCCTTAAATCAAGAGATTAGACAATCATTGCTT |
| | | | GTCATGAATATTTAATAAAAATTTGAGAAAGCTCAGTTTCTTTT |
| | | | GGGCTGCAAACATAGATCTAGGGAAATAAATACTGCTTAACTA |
| | | | TTTTGTTG |
| 1657 | TPX2 | 3881454 | AAGGTGACCTGCTGAGAAAAGTGGTACAAATACTGGGAAAAA |
| | | | CCTGCTCTTCTGC |
| 1658 | TPX2 | 3881455 | CACAAGTTAAAAGCTCTTATTCCTATGATGCCCCCTCGGATTTC |
| | | | ATCAATTTTTCATCCTTGGATGATGAAGGAGATACTCAAAACAT |
| | | | AGATT |
| 1659 | TPX2 | 3881456 | TACTGGTAGGGAGCTTTAGTTTGCATTTTAAATGCGTGATAGT |
| | | | GATTTGTTTTGCTTCCTTGCTGATCAGACAATGATGATCTTCCC |
| | | | TTTTCACAG |
| 1660 | TPX2 | 3881457 | GGAACTGGAGGGCTTTTTCAGGGCAAAACTCCTTTGAGAAAG |
| | | | GCTAATCTTCAGCAAGCTATTGTCACACCTTTGAAAC |
| 1661 | TPX2 | 3881458 | GACAACACTTACTACAAAGAGGCAGAAAAAGAAAATCTTGTGG |
| | | | AACAATCCATTCCGTCAAATGCTTGTTCTTCCCTGGAAGTTGA |
| | | | GGCAGCCATATCAAGAAAA |
| 1662 | TPX2 | 3881459 | CAAGAGATGTGCCACTCCTGTAATCATCGATGAAAT |
| 1663 | TPX2 | 3881460 | CCTTGTATACCACTTGTAAGTTTCTTTTCTGAATTTACACTTTAG |
| | | | ATTGAATAGATTAAAATTAAAAATGGTACATCTGTAATATGTTT |
| | | | GGTGTACCTCAA |
| 1664 | TPX2 | 3881461 | TCCATATGCAGTAGATTTGGGGAGGAGGGTACAGGCTATGCT |
| | | | TCAGGGAATTGAAAAC |
| 1665 | TPX2 | 3881462 | AGAAGGCAGTGCTCATCAAGATACTGCTGAAAAGAATGCATCT |
| | | | TCCCCAGAGAAAGCCAAGGGTAGACATACTGTGCCTTGTATG |
| | | | CCACCTG |
| 1666 | TPX2 | 3881463 | GAGAAGAGTATGAAAATGCAGCAAGAGGTGG |
| 1667 | TPX2 | 3881464 | ATCAGTGAGCCAGGTCACCAAATCAGTTGACTTCCACTTCCGC |
| | | | ACAGATGAGCGAATCAAACAACATCCTAAGAACCAGGAGGAAT |
| | | | ATAAGGAAGTGAACTTTACATCTGAACTACGAAAGCATCCTTC |
| 1668 | TPX2 | 3881465 | GGTTGGGGCAGACCAGTCAAATCTCATGCAGTTTTGTTACCAG |
| | | | AGCACCAACAAAATCAGTAATAATCGTTAAGTAAAAATGCTAGT |
| | | | ACTAATAATCTCCACTTGCATTTGTAGTCAGTATCATCATTTTTT |
| | | | GAAATTAGTTATTTGCATTCTTAAACCCTGAGGTTATGCTTCTT |
| | | | TCTTTGAGATACAGGTCCTTGAAGGGTTTTGCTTCCAATTAGA |
| | | | GACCAGTTTTATCAAAATTACTGGTCCAAGGAATAGGAATAGG |
| | | | CTTCTTCATCAGTCTC |
| 1669 | TPX2 | 3881466 | CTCTGTGCCGAATATGTGGCTTATGGTAGATGTGAGCTCTTCC |
| | | | GTGACATTTCATT |
| 1670 | TPX2 | 3881467 | GCCCGAGTGACTAAGGGATGTACCATTGTTAAGCCTTTCAACC |
| | | | TGTCCCAAGGAAAGAAAAGAACATTTGATGAAACAGTTTCTAC |
| | | | ATATGTGCCCCTTGCACAGCAAGTTGAAGACTTCC |
| 1671 | TPX2 | 3881468 | ATGGCTCACTTCAGTGTCCAACTCCTGGGCT |
| 1672 | TPX2 | 3881469 | TGAATCACCACTTACAAGTAAACTGGGTCTTGCGGATCTAGAT |
| | | | GAACATCTGTC |
| 1673 | TPX2 | 3881470 | CTGTTACCCTCCAAATCTTCTGTGACCAAGATTTGCAGAGACC |
| | | | CACAGACTCCTGTACTGCAAACCAAACACCGTGCACGGGCTG |
| | | | TGACCTGCAAAAGTACAGCAGAGCTGGAGGCTGAGGAGCTCG |
| | | | AGAAATTGCAACA |
| 1674 | TPX2 | 3881471 | GTAAGTCCCACTGGCAGTATCTGAG |
| 1675 | TPX2 | 3881472 | CTTGATCCCAGAATACTTGAAGGTGGGCCCATCTTGCCCAAGA |
| | | | AACCACCTGTGAAACCACCCACCGAGCCTATTGGCTTTGATTT |
| | | | GGAAATTGAGAAAAGAATCCAGGAGCGAGAATCAAAGAAGAA |
| | | | AACAGAGGATGAACACTTTGAATTTCATTCCAGACCTTGCCCT |
| | | | ACTAAGATTTTG |
| 1676 | TPX2 | 3881473 | CACCTGTTTCAGATGAGGTAACCGAGGCACACAGAGGTTATG |
| | | | TAGTATTCCTAGAGCACTCAGCTAGTACATGGTGGAGCAAGTA |
| | | | AGAGTTCAGACACTCTAGCTACAGAGTCTGTGATCCTAATACC |
| | | | TCATTATATGCCTCTCCATTACATGATAGAATTTTGACTTGCAG |
| | | | AAATGCAAATGGACTGGATTGGCAGAACATTCCAGGCAGTAG |
| | | | GAATTACATGATAAAAAGCCTGACGGTGGGAAACAAGAAGCTT |
| | | | CTACTGGGAGCTGTTAGTGGGTCAGTTAAGCTGGAGAAAAGT |
| | | | TTATCAAGAGCCACTGGAAACTGTTTCAGAGAAGTGAGTTGTA |
| | | | GTTTGATAATAGGCTCACAACCACAAGTTTAGAGAAAATGTGC |
| | | | AATCAGGAAGCAAGGCTACAGTCAGAGAATAAGCAATGGAGT |
| | | | TAAGCACCTGCATAAATGCGAAAGCGGCTTTTAGTTACATTTC |
| | | | AGTG |
| 1677 | TPX2 | 3881474 | ACAGGGACCGTGTGTATCTATATTATTCACTCTGTATCCCTAG |
| | | | CCCCTAGCATAGTGACCACCACAGCACAAGCACTCTGATATC |
| | | | GGATAACTGAGTGAGTAATAGTAGAAGCTGACATGCACCTAGA |
| | | | CACTAGGAATTCAAAGATGGTATAAGACACGGCCCTTGTCCTC |
| | | | AAAGCTTTCATAGTCTGGTAGAGCATATAGATGTGTAAATGAG |
| | | | TAAATATGGTAATATTAACCAACATATGTTCATTGAACAGTTAC |
| | | | TACGGGGTCTTCTA |
| 1678 | TPX2 | 3881475 | AGTGGAGATCATTTTGTGATATCTAATTGAGTTGCTTACTCCTT |
| | | | TCAG |
| 1679 | TPX2 | 3881476 | TGTTCCTGAAAAGAAGGTACTTCCAATCACC |
| 1680 | TPX2 | 3881477 | CATTGAAGAACAGAATTCGAATGCCCACCAAAGA |
| 1681 | TPX2 | 3881478 | GACGAACCGGTAGTGATAAAAGCTCAACCTGTGCCACATTATG |
| | | | GGGTGCCTTTTAAGCCCCAAATCCCAGAGGCAAGAACTGTGG |
| | | | AAATATGCCCTTTCTCGTTTGATTCTCGAGACAAAGAACGTCA |
| | | | GTTA |
| 1682 | TPX2 | 3881479 | GTGCCCAAGTTCAAGGCACTTCCCTTGCCTCATTTTGACACCA |
| | | | TTAACCTGCCAGAGAAGAAGGTAAAGAATGTGACCCAGATTGA |
| | | | ACCTTTCTGCTTGGAGACTGACAG |
| 1683 | TPX2 | 3881480 | GTAGGGGATGGGGAGAGCAGCCAAAATGTTAATTGCTTG |
| 1684 | TPX2 | 3881481 | TTGGAGGTGGGAAGAATACTTTATAGGTGATACTGTATAGTTC |
| | | | CTAATGAATCATGTGTGAAGGCAGAAAATGTCTAGTTGTTTATT |
| | | | TTTATGATATAAAGATAGGTCTTAAAAGTACCTTTAAAATTTTTT |
| | | | GTTTTTTTTAATTGACAAATAATAGTTGTACATATTCTTGGGGTA |
| | | | CATAGTGATGTTTCAATATGTATAATGTGTAATGATCTGATCAG |
| | | | GGTAATTAGCATATCCATAATCTCAAACATTTATCATTTCTTTGT |
| | | | GTTTGGAATCTTTTTTTTTTTAATTTAAAAGTAAACTTTAGCACA |
| | | | CCAACATG |
| 1685 | TPX2 | 3881482 | CTTGTTTCAAGGCTCGTCCAAACACCGTCATCTCTCAGGAG |
| 1686 | TPX2 | 3881483 | TTCAGGAACCTTTTCAGCTGGCTACTGAGAAGAGAGCCAAAGA |
| | | | GCGGCAGGAGCTGGAGAAGAGAATGGCTGAGGTAGAAGCCC |
| | | | AGAAAGCCCAGCAGTTGGAGGAGGCCAGACTACAGGAGGAA |
| | | | GAG |
| 1687 | TPX2 | 3881484 | TGGGAGCATGAGCACTGACGAACACAAACATGCCTCTG |
| 1688 | TPX2 | 3881485 | AACCATGATGCCTTTCCTAGGACTGTTTTTTATTTATTTGTTTAT |
| | | | TTTATTTATGTAACTTATTATTTCCTCTGGGGTTAAGAAGCACC |
| | | | ACTGAGTTTTGTAATTAGACAAGAATACATAGCGAAGGACATG |
| | | | GGAATTAAATGGCAACTGTATTTTTGTTTTAATACTGAGCCCAA |
| | | | ACTCCTTGGAGTTACAGTGTTCGTCGCTCCAGGTAATCCTCTA |
| | | | CTAACATAATTATTTAGATGTTGGTTATCCAAAAAGAAACCTGA |
| | | | ACTCCACATTAAGGACCAATCTGCTAGGAGGGC |
| 1689 | TPX2 | 3881486 | TGTACTCTGGGAAATTCTTAGCTTGTAACTTCTCTGCTATACTT |
| | | | GAGTACAGCCCTATTATACCCTAGTAAATCACACAGGACATAG |
| | | | GTTTGGCATTCTTTAGTGAAAGCTGAGGGACTTGAGGAGACTG |
| | | | TGGCCTAAAGGAAAGCTGGGGGACCCAATAGAGACCTGAATA |
| | | | GAAACCCTTTTGGGCTCCAAAGCACATACACTTTTCCATCATA |
| | | | CCGTGTTGCCCCCCAGGCCCCACTCCCCACACCTGAAACTAG |
| | | | TGACTGGGACCTGTA |
| 1690 | TPX2 | 3881487 | GTGCATAAGGCAAATCCAATACGCAAGTACCAGGGTCTGGAG |
| | | | ATAAAGTCAAGTGACCAGCCTCTGACTGTG |
| 1691 | TPX2 | 3881488 | CCAAATTCTCCACTCGATTCCACTGCTAA |
| 1692 | TPX2 | 3881489 | TCAGCTGTGAGCTGCGGATACCGCCCGGCAATGGGACCTGCT |
| | | | CTTAACCTCAAACCTAGGACCGTCTTGCTTTGTCATTGGGCAT |
| | | | GGAGAGAACCCATTTCTCCAGACTTTTACCTACCCGTGCCTGA |
| | | | GA |
| 1693 | TPX2 | 3881490 | CAGAAAATAAAGATAGTTAAATCCT |
| 1694 | TPX2 | 3881491 | GTCCTCTTCTCTGCATACCGTGAATTTATAGTTAAGGATCCCTT |
| | | | TGCTGTGAGGGTAGAAAACCTCACCAACTGCACCAGTGAGGA |
| | | | AGAAGACTGCGTGGATTCATGGGGAGCCTCACAGCAGCCACG |
| | | | CAGCAGGCTCTGGGTGGGGCTGCCGTTAAGGCACGTTCTTTC |
| 1695 | TPX2 | 3881492 | GGAACCGTGCAGTGTGCATTTTAAGACC |
| 1696 | TPX2 | 3881493 | TGGCCTGGAATAAATACGTTTTGTC |
| 1697 | TPX2 | 3881499 | ATGGAGTTTCACCATTTTGGCCAGGCTGGTCTCGAACTCCTGA |
| | | | CCTCAGGTGATCTACCTGCCTCGGCCTCTGAAA |
| 1698 | TPX2 | 3881500 | GTGCTCTGAAACCTACTTTGCCTGATATTAATATAGCCACTCTA |
| | | | GTTTTCTTTTGATTGGTTTTAGCATGGTATGTCTATATTTAAAGT |
| | | | GCATTTTTTTGTAGACAGCATATAATTGGGTCTTGCTTTATTATT |
| | | | TAATATTATTGTTGCTGCATTTTAATTGGAATAAATGCATCTATT |
| | | | TTAGCCTTGACATGCTATGCTATTATTTTGTGTGTGCGTGTGAG |
| | | | TCTCTCTGCCCCAAAAATATTTCTTTAGGAGATGAACCAAATGA |
| | | | TTGTTCTCTGAAATGAATAATGCCTAAACTATGTTTTCATGGCC |
| | | | TATCTTTTCTTCCCTGTCATCTTGTTGCAGTTTAATTCCTTTATC |
| | | | AGGAGTCAGTTCATATGCTATGTGATTAAGTGCTGTTTCTTCCA |
| | | | TG |
| 1699 | WFDC2 | 3886939 | TAAATCCCCGCACCTGAGCATCGGCTCACA |
| 1700 | WFDC2 | 3886940 | ATGCCTGCTTGTCGCCTAGGCCCGCTAGCCGCCGCCCTCC |
| 1701 | WFDC2 | 3886941 | CTGCTGCTGTTCGGCTTCACCCTAGTCTCAG |
| 1702 | WFDC2 | 3886942 | CCAGGCTGACCAGAACTGCACGCAAGAGTGCGTCTCGGACAG |
| | | | CGAATGCGCCGACAACCTCAAGTGCTGCAGCGCGGGCTGTG |
| | | | CCACCTTCT |
| 1703 | WFDC2 | 3886943 | GGCGGGGCCGCGCTGGGCTGGGAGGAG |
| 1704 | WFDC2 | 3886944 | GCAGTTTCCTTCTCGAACCGGCCGAAGCCTGCCCTGCGGGAA |
| | | | AGCCCGGAGCCTGGGGCGCTCACCTCTCCTCTTGGAGTCCCT |
| | | | CCCTGGGGGCCTCCCCCAGCCCTGGGGAAAGACTGGGAGAG |
| | | | CCTGGCCTGGCAAGATTTTCCCCAATTCCTCTGTCCAGGCGG |
| | | | AAAGGAACTTTACAGATTTAGGAAAATGCCCCGCTCATCTTAA |
| | | | AGATGTGTAAGGGAGCATCGGTGAGAAAAAAATGTTCTTGCCC |
| | | | AAGGTCACACCGCCATCCCATGGCTGCTGGAGTCATAGTGAG |
| | | | GGTTCA |
| 1705 | WFDC2 | 3886945 | CTGGACACTGTATCGCCCTTCGTCGTCTTTCAGTCAATCTCTT |
| | | | CCACTCTAAGGATTGAGTGAGCGCGAGCTGGGGACTCTCTCA |
| | | | AAG |
| 1706 | WFDC2 | 3886946 | GCAGTCTCCACCAGGCTATCAGAACAGGGGGTGGCTTAAAC |
| 1707 | WFDC2 | 3886947 | CTTTATCCAGAATACAGCCCCTGTGACTTTT |
| 1708 | WFDC2 | 3886948 | TACGGTGACCCAAGACACCGATCAGCAGGGAGGTG |
| 1709 | WFDC2 | 3886949 | AGATTTGGAGAGAAAGCAGGCAGCAGCCAGATGAGAGAGGTG |
| | | | GAGGAGCAAAGGAGGGAGTCTTTGCTGTTTGATGGATGA |
| 1710 | WFDC2 | 3886950 | ATCAGGTGGCTGTAGATGTGTAGTGT |
| 1711 | WFDC2 | 3886951 | GTATCTGCTCCAGAGTGCACTATTCCTCACGGCACAGTCCCTC |
| | | | ATGGCTTCCCTTGGCTAGGGGAGGGAGTTCCCTGACCTCTTG |
| | | | TGCTTCCCAGGTGAGATGATGCCCTACCCTACTTCTGCTCGCC |
| 1712 | WFDC2 | 3886952 | AACCATGATGTACCTCAGTTGATGAATGGATTTGGCTGGGCCT |
| | | | GGCTCCCCTCTATCTAACCTGGGAAGTGGAGTGTGATTGTGT |
| | | | GTGTGTTTGTTAGTGGAAGGACGTGTGGTTTCTCTCTGCATGG |
| | | | ATGAATGAGTGTATTTGGAGGGTCATGGTGCTGAGAGACTGC |
| | | | AACTGGGATTCGGTCTGTGGGTATGAGTGAAGATTATAAGTGT |
| | | | GTAACCCCTCACATGTGTACTGTACTTTACACTTTAAGTGGCA |
| | | | GCATAGTGCTTAACCATGGCAGCAGCAGTTAACACATAGACTC |
| | | | TGCAGCTAGATTTCTTGGGGTTC |
| 1713 | WFDC2 | 3886953 | TTAGGGGCTTGATACCTGGCATGTAATAAGAGCTAATTAAGTG |
| | | | TTCACTGTTATAATTTCTCATAACTACAGAGTAGT |
| 1714 | WFDC2 | 3886954 | TGGCACCTAAAGACACGGAGGCTCTGGGAGATTTCTGGCCCT |
| | | | AGGCCACGAAGGCCCACTTGGGACTCAAGCT |
| 1715 | WFDC2 | 3886955 | GGTCCTGTGATTCCATTTGGGAGCAGGAGGAGGGATTTGCAG |
| 1716 | WFDC2 | 3886956 | CTCAGGTGCCCAAGATGGACTCAGGCAGGCAGCTCTGCTGTA |
| | | | TGTGAAGCCCAGTGAGG |
| 1717 | WFDC2 | 3886957 | ATGCTGCAGGTACAAGTTAATCTCCCTGTATCGCCTCTGCCCA |
| | | | CTTACCCT |
| 1718 | WFDC2 | 3886958 | GTGAACATTAACTTTCCCCAGCTCGGCCTCTGTCGGGACCAGT |
| | | | GCCAGGTGGACAGCCAGTGTCCTGGCCAGATGAAATGCTGCC |
| | | | GCAATGGCTGTGGGAAGGTGT |
| 1719 | WFDC2 | 3886959 | GCCTAGTCTAATGGATATTGTTGTTGATGGTATTGTTATAATTT |
| | | | TCT |
| 1720 | WFDC2 | 3886960 | CCACCACCAGGCTGAGCAGTGAGGAGAGAAAGTTTCTGCCTG |
| | | | GCCCTGCATCTGGTTCCAGCCCACCTGC |
| 1721 | WFDC2 | 3886961 | CCCTCTTGGGCTGACCACAGCTTCTCCC |
| 1722 | FMO5 | 3928073 | GTGGGAAGAAAGACTGGGATGATGACCAAAA |
| 1723 | FMO5 | 3928077 | GAAAACTCTGGAGTTAAGGCCAATGAAGTAATCTCTAAACTTT |
| | | | ATGCAGTAC |
| 1724 | FMO5 | 3928078 | AATTGAATTAGCCAAACAGATCACATCA |
| 1725 | FMO5 | 3928079 | GGCTCTACAGACAATCTGATGGATGA |
| 1726 | FMO5 | 3928081 | GAGATACTCAGGTGGTGGTTTTTAA |
| 1727 | FMO5 | 3928085 | CTATTGCTGATACTGGTGCAAATGTCGTAGTAACAGGTGGCAA |
| | | | AGTGGCAGACATGGCTCTTCATTA |
| 1728 | FMO5 | 3928087 | AAATAGCAGTGTACTCTTGTCCTTTTGATGGCATGATAACAGA |
| | | | AACTAAG |
| 1729 | FMO5 | 3928089 | GTTGATAACATCAGAGTTTGTAAAATTCT |
| 1730 | FMO5 | 3928093 | CCTGGAATTAGCTGAAGAACTTCTGA |
| 1731 | FMO5 | 3928097 | AGAAGAGGCTGTGTATAGAAACATACAAGCTTGCAAGGAGCTT |
| | | | GCCCAAACCACTCGTACAGCATATGGAC |
| 1732 | PCAT14 | 3939348 | GGTGAAGGGACTCTCGAGTGTGGTCATTGA |
| 1733 | PCAT14 | 3939349 | AAGGCCTCCGTCTCCTGCATGTCCTT |
| 1734 | PCAT14 | 3939350 | GGTACTCTACAGTGTGGTCATTGAGGACAAGTTGACGAGAGA |
| | | | GTCCCAAGTACGTCCACGGTCAGC |
| 1735 | PCAT14 | 3939351 | CAGCAAGGAACGGAAAGTTCACATTGTAAATATGTAGCAGAGT |
| | | | CTGTAATGGCTCAGTCAACGCAAAATGTTGACTACAGTCAATT |
| | | | ACAGGAGATAATATACCCTGAATCATCAAAATTGGGGGAAGGA |
| | | | GGTCCAGAATCATTGGGGCCATCAGAGCCTAAACCACGATC |
| 1736 | PCAT14 | 3939352 | CTACAATGAACTCACTGGAGATGCAAAGAAAAGTGTGGAGATG |
| | | | GAGACACCCCAATCGACTCGCCAG |
| 1737 | PCAT14 | 3939353 | CAGGAACGGAGACAATCGTGAAAGCTGCTGATAGCCTCACAA |
| | | | ATCTTAAGCCAGTCACTTGGGTTAAAAGCATCAGAAGTTTCAC |
| | | | TATTGTAAATTTCATA |
| 1738 | PCAT14 | 3939354 | ATGGGCCATAGTGACGATGGTGGTTTTGTCAAAAAGAAAAGG |
| | | | GGGGGATATGTAAGGAAAAGAGAGATCAGACTTTCACTGTGT |
| | | | CTATGTAGAAAAGGAAGACATAAGAAACTCCATTTTGATCTGTA |
| | | | CTAAGAAAAATTGTTTTGCCTTGAGATGCTGTTAATCTGTAACT |
| | | | TTAGCCCCAACCCTGTGCTCACGGAAACATGTGCTGTAAGGTT |
| | | | TAAGGGATC |
| 1739 | PCAT14 | 3939356 | ATTTTAGGCGCTGGACTTGGGTTCGGGGCACCTGGCCTTTCC |
| | | | TTGTGTATTTCTCCTACTGTCTGCCTAACTATTTAATACAATAAA |
| | | | AGAAAACCAGCCCCTGGTTCTTGTGGTGTTTCCACCCTCCCG |
| | | | GGTCCCCGCTGGCTGCCTGGCTTCCTCCCGCAGCTCCTGCTG |
| | | | TGTGTGTATGTGTGTGTGTGTGCACATCTGTGGGGCGTATGTG |
| | | | TGTTCGTCTTTGTAATTGAGGCTGCAGAGTGGAGAGAGCAGG |
| | | | GGTTTTCTCTGGGGACCCAGAGAGAAGGAGGCGTTTTCACCA |
| | | | CAGC |
| 1740 | PCAT14 | 3939358 | CCTTTGAGGGAGATCAAGTCTAAATTTGAAGGGAGTCCAAATT |
| | | | CATACTGGGGTAATTTATTCAGATTATAAAGGGGGAATTCAGT |
| | | | TAGTGATCAGCTCCACTGTTCCCCGGAGTGCCAATCCAGGTG |
| | | | ATAGAATTGCTCAATTACTGCTTTTGCCTTATGTTAAAATTGGG |
| | | | GAAAACAAAAAGGAAAGAACAGGAGGGTTTGGAAGTACCAAC |
| | | | CCTGCAGGAAAAGCTGCTTATTGGGCTAATCAGGTCTCAGAG |
| | | | GATAGACCCGTGTGTACAGTCACTATTCAGGGAAAGAGTTTGA |
| | | | AGGATTAGTGGATACCCAGGCTGATGTTTCTGTCATCGGCATA |
| | | | GGTACTGCCTCAG |
| 1741 | PCAT14 | 3939360 | CAGATGGCGTATAATGCCGTAATTCAACCCATGGGGGCTCTC |
| | | | CCACCCCGGTTGCCCTCTCCAGCCATGGTCCCCTTTAATTATA |
| | | | ATTGATCTGAAGGATTGCTTTTTTACCATTCCTCTGGCAAAACA |
| | | | GGATTTTGAAAAATTTGCTTTTACCACACCAGCCTAAATAATAA |
| | | | AGAACCAGCCACCAGGTTTCAGTGGAAAGTATTGCCTCAGGG |
| | | | AATGCTTAATAGTTCAACTATTTGTCAGCTCAAGCTCTGCAACC |
| | | | AGTTAGAGACAAGTTTTCAGACTGTTACATCGTTCACTATGTTG |
| | | | ATATTTTGTGTGCTGCAGAAACGAGAGACAAATTAATTGACCG |
| | | | TTACACATTTCTGCAGACAGAGGTTGCCAACGCGGGACTGAC |
| | | | AATAACA |
| 1742 | PCAT14 | 3939362 | GGTTGCCGTCATTACAGTGTTAACAAGATTTTAATCAGTCTATT |
| | | | AACATTGTATCAGATTCTGCATATGTAGTACAGGCTACAAAGG |
| | | | ATATTGAGAGAGCCCTAATCAAATACATTATGGATGATCAGTTA |
| | | | AACCCGCTGTTTAATTTGTTACAACAAAATGTAAGAAAAAGAAA |
| | | | TTTCCCATTTTATATTACTCATATTCGAGCACACACTAATTTACC |
| | | | AGGGCCTTTAACTAAAGCAAATGAACAAGCTGACTTGCTAGTA |
| | | | TCATCTGCATTCATGGAAGCACAAGAACTTCATGCCTTGACTC |
| | | | ATGTAAATGCAATAGGATTAAAAAATAAATTTGATATCACATGG |
| | | | AAACAGACAAAAAATATTGTACAACATTGCACCCAGTGTCAGA |
| | | | TTCTACACCTGGCCACTC |
| 1743 | PCAT14 | 3939364 | AGGTCAGGCCGGTTCTTTGCTCTGAACCCTGTTTTCTGTTAAG |
| | | | ATGTTTATCAAGACAATACATGCACCGCTGAACATAGACCCTT |
| | | | ATCAGGAGTTTCTGATTTTGCTCTGGTCCTGTTTCTTCAGAAGC |
| 1744 | PICK1 | 3945181 | ATGCTGCCGGATGAGGTGGATGCCTGGCTGTGGCTCTGGGA |
| | | | GAGCCAACCTCCCCCAGGGAACCCACTTTACACAATAGCAGT |
| | | | GGCAGCAGAGGCTGGCGAGGAGACAAGATTCGGACTCTGGG |
| | | | GAGCACTGATAGCATTTCCCGAGCCTCA |
| 1745 | PICK1 | 3945182 | ACGCTGTCAGCCTGTCCAGACCGTTCCTCTGTTTTCGCTTGTT |
| | | | CCTACTAACAGCGAGCTTCCGCCAATACTTGTTCTCGTTCTTG |
| | | | GTTCCGAGCGTCCCGGGAGCCGGGAAGGGAAGGATTGTCTG |
| | | | CAGGGATTGGAGCAAATATCCAGTGGGGGGAAAGCCGGGAC |
| | | | TTCCGCGTCTTGCCGGAAGTGACGTGACAATCGCGGCCA |
| 1746 | PICK1 | 3945183 | TGGCCGGGACCCGGCTGTGGGACCAACGCTTCCG |
| 1747 | PICK1 | 3945184 | ACTCTGGGATCTGAGCCTATCGCCCTGGCCTGGAGC |
| 1748 | PICK1 | 3945185 | TTGGGTTCCTTAAATCCTATGCTCCTTTCT |
| 1749 | PICK1 | 3945186 | CCCTACCGAGCTGGGCAGTTAGCCAGCCCACTCCAACT |
| 1750 | PICK1 | 3945187 | CAGACTTGGATTATGACATCGAAGAGGATAAACT |
| 1751 | PICK1 | 3945188 | AAGGATGCTCAGAACCTGATCGGGATCAGCATTGGAGGAGGG |
| | | | GCCCAGTACTGTCCCTGCCTCTATATCGT |
| 1752 | PICK1 | 3945189 | AGCAGCCTTGGACGGCACAGTGGCAGCTGGCGATGAGATCA |
| | | | CCGGTGTCAATGGCAGGTCAATCAAAGGGAAAACTAAGGTGG |
| | | | AGGTGGCGAAGATGATTCAGGA |
| 1753 | PICK1 | 3945190 | CAGAGCAGGTGTCCAGAGGCAGCAACACATGTTTCTGAGA |
| 1754 | PICK1 | 3945191 | GAGGTGACCATCCACTACAACAAGCTGCAGGCGGACCCCAAG |
| | | | CAGGGCATGTCCCTGGACATT |
| 1755 | PICK1 | 3945192 | GCCCAAAGGAGAAGTGCCACAGCCAGCCCTGCCCTCCCCTTT |
| | | | ATGACAGGAGAATCCAGAGTTACATGGCTGTGGGCTCTGACC |
| | | | TCTGACCAAGCAAATCTGAAAGGCCTGGGAGGCCTCCCGGTG |
| | | | CTCTCCCTGCATCTGTTCTTGTACTCTGTC |
| 1756 | PICK1 | 3945193 | TGTTGAAGAAAGTCAAGCACCGGCTGGTGGAGAACATGAGTT |
| | | | CAGGGACCGCAGATGCTCTGGGCCTGAGCCGGGCCATCCTG |
| | | | TGCAA |
| 1757 | PICK1 | 3945194 | CTCTGCCCGTGGAACTGAGAAGTCACCATCTCTGTACCCCCA |
| | | | GAGGCCTCTCCAGCTCCCGGAGGGTCCACAGCTGTCAGCTG |
| | | | GGCTGTCTTAGCCAGTGCCCCTCAGGTCACAGATGGGAAAAT |
| | | | AGACTTAGTGTGGGGAGGTGCCTCTGCCCCTGCCCTCAGCCC |
| | | | CTTACCCCTCACCCCAGCACTCTCGCGGCCCACCTCCTGCCT |
| | | | CCTTTGTCCAGGAGGTGGTGCTGCTGCCCTTGCCTCTGCAGG |
| | | | TCCTCCCTTCGTGGTGGCTGCGCAGGCGAGGGGGGAGGCGT |
| | | | GTACATGCACATTTACACACGCATGCACACATGCGCACACACT |
| | | | TTCCCTCCCTGGGGTGGCCAGCGAAACACTCAGTCCCCCTCC |
| | | | TACCGTCGCCAGTCCGAGTTTAAAAATAGCAGCAGCTCTGCA |
| | | | GTGTGCCTGTGGGGTAGATATAAATACTTCTAGAAATTGTAGG |
| | | | CTCAGCTGGGCACACTGGGCTTTATTGGCTAA |
| 1758 | PICK1 | 3945195 | CTTGTCAAGAGGCTAGAGGAGCTGGAGCGGACCGCTGAGCTA |
| | | | TACAAAG |
| 1759 | PICK1 | 3945196 | TACGGGCCTTTTATGAGCTGTCGCAGACTCACCGGG |
| 1760 | PICK1 | 3945197 | CCTGCGGGGAACATCTAGATCAGCTGGTCTCTTAAGGGCCGC |
| | | | AACGATGAACAGGCCCCACCCTGTCTCCTCACACTGCCACTG |
| | | | GCAGTACACAAGGCCCTTGCTTATTTATATTTCTGACAACCTGT |
| | | | AACTCTGGGCAGGCCGACTGCAGCTGACCCCAGCTACTGCAG |
| | | | AAAATGAAGCCCAGACAAAGGAGAGGGCCACACTGCTCCCAA |
| | | | GTGGTGGAGCTGTTGTTCCAATCCAGGTGTCTAGACTCGGAC |
| | | | CAGTGTTCTGCCTCA |
| 1761 | PICK1 | 3945198 | CAATCCAGTTTCCTCCAGGTGTAGACTCAGCTCCTTCAGGGG |
| | | | GTTTAGACCAGCTCTCTTGGAGGTGTAGCCCCTGTGCAGACAT |
| | | | TGGCTTCCAGCCTGCCAGGCCCCCTGCCCTGCTTCTCCCCAA |
| | | | CAAACCCCTGGCTTCTCTTAGGGGGCCAAGTAGGGGCAGCCT |
| | | | TCAAGGCAAACTTGTCCTGCA |
| 1762 | PICK1 | 3945199 | TTTGGGGACGTGTTCTCCGTGATCGGGGTGCGGGAGCCCCA |
| | | | GCCAGCTGCGAGCGAGGCTTTTGTGAAGTTCGCCGATGCCCA |
| | | | CCGCAGCATCGAGAAGTTCGGCATTCGGCTTCTGAAAACCA |
| 1763 | PICK1 | 3945200 | ACTGAGTCACAGCTTGCCCTAGGCCTGGCACTAGTCTTCTCAT |
| | | | CCTTGAGAGGGACAAGGCATCAGGGAGCACCATCTGGCTCTG |
| | | | ATAGTCGAGTCCACCAACAAGGGTGACGCATCAGTGCCATTC |
| | | | ATTG |
| 1764 | PICK1 | 3945201 | GACGGATCTGAACACGTACCTCAACAAAGCCATCCCGGACAC |
| | | | TCGCCTCACCATCAAGAAGTACCTGGACGTGAAGTTTGAGTAC |
| | | | CTG |
| 1765 | PICK1 | 3945202 | CTGCTGCGCCTGCACAAAGAAGCATCTG |
| 1766 | PICK1 | 3945203 | GGACTCCCTGAACACCTGCGCCAGCCTCTCCTGCTGCGTGTG |
| | | | GGTGATGGGGGTGGAGCTGGGGACCTGGGGTGGGGGTAGTA |
| | | | CCACTCTGACAGCCT |
| 1767 | PICK1 | 3945204 | GATGGATGACGAGGAATACAGCTGCATT |
| 1768 | PICK1 | 3945205 | CTGGACTCTCGTTCCTGGAGATTTAGGGCCATCTTCCCAGTCC |
| | | | CGCTCGCTGGGCCTCGGGGTGCTGGGCACCCGGCCGGGAAC |
| | | | CACTCCCTCAGTCTGGGGGACTCTTGGAGGGAAATCGGATTT |
| | | | TCTTCACTCCTATGAGGCGCTTTTAAGTGTTTGATTTTTCTGCT |
| | | | GTCGGGATCCATTTCGTGGCCAGTGTTCATTGAATGTGGCAGA |
| | | | GGTTTGGGTTTGGTTTTTTCCTCTCTTCAAAGCTATCACTGAGT |
| | | | GCTTCTGAGAAACACTGAAGTCTCAGAAATGAGGTCTCAGGAA |
| | | | TGAAGAACAGCCGTGGCTTTGAAAGCACA |
| 1769 | PICK1 | 3945206 | GGCGAGCCCCTTTACCGGGTGAGCACCGGCAACTATGAGTAC |
| | | | CGCCTGATCCTGCGCTGCCGCCAGGAGGCGCGCGCCCGCTT |
| | | | CTCCCAGATGCGCAAGGATG |
| 1770 | PICK1 | 3945207 | GCCTCGTGTCCACCATGTCCAAGTACTACAACGACTGCTACGC |
| | | | AGTGCTGCGGGATGCCGACGTCTTCCCCATCGA |
| 1771 | PICK1 | 3945208 | GTAGACCTGGCGCACACCACATTGGCCTATGGCCTCAACCAG |
| | | | G |
| 1772 | PICK1 | 3945209 | GTTCACAGATGGGGAGGAGGAGGAGGA |
| 1773 | PICK1 | 3945210 | TGGGGAGCCGTCCAGGGATACACGAGGGGCTGCTGGGC |
| 1774 | PICK1 | 3945211 | GTGCCCCGCGGCTGTGGTGCCGGGGGCAGG |
| 1775 | PICK1 | 3945212 | GCGACGCATAAAGGCCTGCTGGCTTGGGGCGCCTGCCTCCCT |
| | | | GCTCCTCTGTCCTCGCACAGCGAACCTGGGCTCCTGCCCAGG |
| | | | ACAGGCACCAGGGTCATGGCCTGGGACCTGGACACTGGCCC |
| | | | CTCCACCCTCCCTCCCCTCCCGGCTCCCCGGCCAGAGGGAG |
| | | | AGCTTGGTCTCTGGACCTGCCTTAGGAAGGAGAGGGAGGGCA |
| | | | GGAAGGAAAAGAAAGGACTTGGAGGTGGCAGGAGTCCGAGC |
| | | | CCTGCTCCTTGTGGGCGCTCACACTGCCCCCGGAGCCTGCTG |
| | | | GGAGTGGGGCCAGCCGTGGACAGCTGAGGTTGGGGTCAATG |
| | | | CCTCCTGGGCACCCTTGCCTCGCCCCAGACCGGCCCGTCCA |
| | | | GTCCCCATCACACCTCGGCGGCCTTTATTTA |
| 1776 | PICK1 | 3945213 | TGGGTTCTGGGCCTGTATCGAATAAACACAAACCTG |
| 1777 | FTH1P8 | 3994182 | CTCAGAGGCGGCCATCAACCGCCAGATCAA |
| 1778 | FTH1P8 | 3994183 | GTCTTACTACTTTGACCACGATGATGTGGCTTTGAAGAACTTT |
| | | | GCCAAATACTTTCTTCACCAATCTCATGAGGAGAGGGAACATG |
| | | | CTGAGGAACTGATGAAG |
| 1779 | FTH1P8 | 3994184 | CTGGGAGCGGGCTGAATGAGATGGAG |
| 1780 | VBP1 | 3996816 | CGCAGCCAATCAGCACCTAGAGGTTGGGCTACTTTCGGCCAA |
| | | | AGGAGAACGGGGACTTGTGGGGGACGCTCCCTGCGCACCAA |
| | | | TGAATGTGCATGGAGATGGAGAGGCGGGCCTGCAAGTGCGA |
| | | | ACAAGCCAATC |
| 1781 | VBP1 | 3996817 | CGGCCGTTAAGGACAGTTGTGGCAAAGGAGAAATGGCCACAG |
| | | | GGAATGGGCGGCGGCTCCACCTGGGGATTCCTGAGGCCGTG |
| | | | TTT |
| 1782 | VBP1 | 3996818 | TGGCCTCTAAATAGACCAGGGTCTGAATCCTGGCTCTGCTTCC |
| | | | CAGTTGCTGCTTAACCTTAAGCATATTATTTTACCACTTTGAGC |
| | | | TTGAGTTTCTTTAACTGAAATAGGGATGACAATACTTAGAGAGT |
| | | | TGTTATGGGAAACAGAGAACATGCTTGCAGTATTGCAGTGTAG |
| | | | TAGGTGTCGAATAGGTATTAATATTCATGATGATAGGAAGCAA |
| | | | TATACCATAGTGGTTAGAAGTCAGACCCAGTCCATTCCCCAAC |
| | | | CCCGCTGAGGCAGTAATTTGTTTTC |
| 1783 | VBP1 | 3996819 | CAGTATTAAAGAAGCTGGATGAACAGTACCAGAAGTATAAGTT |
| | | | TATGGAACTCAACCTTGCTCAAAAGAAA |
| 1784 | VBP1 | 3996820 | GCTAAAAGGTCAGATTCCTGAAATTAAACAGACTTTGGAAATT |
| | | | CTAAAATACATGCAGAAGAAAA |
| 1785 | VBP1 | 3996821 | GAGTCCACCAACTCAATGGAGACCAGATTCTTGCTGGCAGATA |
| | | | ACCTGTATTGCAAAGCTTCAGTTCCTCCTACCGATAAAATGTGT |
| | | | CTG |
| 1786 | VBP1 | 3996822 | TGCATATGTTCTTCCTGTCCTTACACATTCTTTATAAGGTTGTT |
| | | | CCCACATTGTTGGAGCACAGAGCCATTATATACTGTTTGCTCT |
| | | | CTCTCTTTCTCTCTCTCATCTTTCATTTATCCTAGTTCTTCGTGT |
| | | | AAATATTG |
| 1787 | VBP1 | 3996823 | TTGATGAAGCTCAGGCATTGTTGGAAAAGAATTTATCGACTGC |
| | | | CACAAAGAATCTTGATTCCCTGGAGGAAGACCTTGACTTTCTT |
| | | | CGAGATCAATTTACTACCACAGA |
| 1788 | VBP1 | 3996824 | TCATCTGACGGGTAGTGTGGAAACTTCATCCAGCTATGAGATG |
| | | | ACGAGGGCCTAGGACGGGTGGCTTGTGGAAAGGAAAAGATAT |
| | | | TAAACGTGTGAGAAAAAAACAGGATCCAGTGACTTAGATGGGT |
| | | | ACAGGAGCCAAAAGTGAGGAAATCCTCTAAGATGAGTCCTACA |
| | | | AGCTTAGTTAAATGCCATTTGTTATTGCTAGTACTGC |
| 1789 | VBP1 | 3996825 | ATATGGCCAGGGTTTATAATTGGGATGTAAAAAGAAGAAACAA |
| | | | GGATGACTCTACCAAGAACAAA |
| 1790 | VBP1 | 3996826 | TATGGAAGCTGAATGCCGGACGCTAGCACAGTTTACTTTTTCC |
| | | | CTTTCTAATCGGCTGATGTTACTCTCACTTGATGTGGTTAAACC |
| | | | ATTTTAGAGGTAGAGAAGACAGACAGTTTGAATATTTGTAAACT |
| | | | TGTTTTTCTTTGGTATATTTAGGACTTAGTGGTCCTCTGTTGCT |
| | | | ATTGTCTTCTATAAGTGGAGTTTCATGACTTACTGCTTAACGAA |
| | | | TAACTAACTACTATGATATTCTGGACATTTTAGGAAATGGTAAT |
| | | | TTGCCTTGCTACACATTAAGAGGG |
| 1791 | VBP1 | 3996827 | GCCTAAGGTGATTTTGTAGTTCTTAACAGTTCTCCAGAGCATCT |
| | | | TGAACAGGAATATTAAGATAAATGTGAATCTGCAATGGCTGAA |
| | | | AAGAGTTGTGAGCTTTTTTATTCATGATAAAACCTTATAGGAAT |
| | | | AGTATAAAAAATCCCTGTGGAAAGCTACTAGTACATTGACCAG |
| | | | CGCTGGGTGATACAGATTCT |
| 1792 | KIAA1210 | 4019318 | GCTCTAAGCTTTGCAAGGGATCCTAAAAGAGGCGGTGGAAGT |
| | | | GAAAATTCTGGGTCTCCAAGAAAATTTCTGCACAGCCAGTTCT |
| | | | CCAATCAGCCTATCACCCCTTGAAACATCTTCCCTGTGTCCCT |
| | | | GGGGGCCCCTGATGCTTTCTCCTTGGGTGATAGTAACATGCA |
| | | | GAGCACTTACACAAAGCTCCCTCTTTGGACATACCCCACGTCG |
| | | | ACCTGTCACAGGCCTGGCTGTAGCGAGCACCTCCCTATGACG |
| | | | CAGAATGCTTCTTGGGAATTATCTTACTCCTCTGGAGGGTTAG |
| | | | TCCATCAATGTTTTGCTTCTTGTCCCAATACTACTGTGACCCTC |
| | | | TCTGATCGCACAGAAATCACTGCCTATCACATATATCCTGTTAA |
| | | | GCACTGAAGACCCTATTGAAATTAGAGTTCTACAGATGCCAAA |
| | | | AGCTGTACTTTCCATCAGGCAGATGGCAAGCTTACTGCCTTGA |
| | | | TGCACATCTGGAGCCACTGGAGCTCCTTCCTCTCTGGTTCCAG |
| | | | CATTAAGGTGGAGAACTCCATGTAGCTTCTTGTCCTTTCCCCT |
| | | | CAGCTGTCTTTGCTTCACAAGGTTTTAGCCCAAAGCAAGAGTG |
| | | | CAATCCCAAAGCCACAGAGAAATGAACTTTCCGCTACCTGGAA |
| | | | GCTTTAAGTGAGTAAATCAGCTTTTCCCCTCTCATTCCTAGAG |
| | | | GCACACACCTCAAAAGTTACTAGGCTGGAGAGACCCTACCTTC |
| | | | CAGTGACCCACTCATCCCCCAGCCACGGAGAAGAGGGAAGAC |
| | | | CAAAAAGGGAGAGTGAGAAAGAGGATGAGAGGGATGGTCAG |
| | | | CTGTGAGGGGAGGGGGCAAGTGGCCCAGCAAATGTTGATGC |
| | | | CTCCCTTCCCATCTTGCCACACGGTCTTTTTCTTTTGTAGCACA |
| | | | GCCTCCATTAATAACTCCTCGGCTGAGGATGAAGATGTAGGCA |
| | | | CCTTTACCCCCAGAGCCAGTTCCTTAATTGGCTGGCTTTCTGA |
| | | | GATGCAGACCACCCTAGAATCTCATCTAGGTTCACTAGAAGTT |
| | | | AGTTAAATCTTCCTTTCTCTGTCTTTCTCTTCATTCCATCCCCC |
| | | | AAACCCACCAAACACTAAGGGAGAGCTCCCTTTGGATGTCTG |
| | | | GGCAGTAAACCTAGCTCATT |
| 1793 | KIAA1210 | 4019319 | AGAAACCAAACGATCTTCAACTCTCCCAGCCAAGTTCCAGAAC |
| | | | CCAGTTGAGCCAATTGAGCCTGTCTGGTTCTCACTGGCCAGG |
| | | | AAGAAAGCCAAAGCATGGAGCCACATGGCA |
| 1794 | KIAA1210 | 4019320 | GATCAGAGGAAACCTGAAAGGAGGAAACATTATATGGCATTCC |
| | | | ATAAACAACATACCCCAATATCGCTGGGGTTCCTTATTGCTTGT |
| | | | GTGTTATTTGCTGTGGTTCC |
| 1795 | KIAA1210 | 4019321 | CCAGTGTCCATAAACAGGAGAAGACAGCACAGATGAAGCCAC |
| | | | CTAAGCCTACAAAATCAG |
| 1796 | KIAA1210 | 4019322 | CCTGCTGGTCAACAGTCAGATTATGCTGTCTCAGAGCCGGTTT |
| | | | GGATAACTATGGCAAAGCAGAAGCAGAAGAGTTTCAAGGCCC |
| | | | ACATTTCTGTGAAAGAGCTGAAAACTAAGAGCAATGCTGGAGC |
| | | | CGATGCTGAGACTAAGGAGCCTA |
| 1797 | KIAA1210 | 4019323 | TCCAGATGGCAAGCAGATATCAAGTGGA |
| 1798 | KIAA1210 | 4019324 | TTTGGAGTTCGACTGAAAAGAGCCCCTCCCTCGCAGAAGTATA |
| | | | AGAGTGAGAAACAAGATAACTTCACCCAGCTTGCTTCAGTGCC |
| | | | CTCGGGCCCAATTTCATCCTCTGTAGGCAGGGGACATAAAATC |
| | | | AGAAGCACTTC |
| 1799 | KIAA1210 | 4019325 | TCCTCAAATTTCGAGCGGGCTGCTATTGAGGCAGACATTTCTG |
| | | | GGAGTCCATTGCCTCCCCAATATGCTACCCAGTTCTTAAAGAG |
| | | | GTCTAAAGTTCAGGAAATGACCTCACGACTAGAGAAAATGGCT |
| | | | GTTGAAGGCACTTCTAACAAATCACCGATTCCCAGGCGTCCGA |
| | | | CCCAGTCATTCGTGAAATTTATGGCACAGCAAATCTTTTCAGA |
| | | | GAGCTCTGCTCTTAAGAGGGGCAGTGATGTGGCACCTCTGCC |
| | | | TCCCAATCTTCCTTCCAAATCTTTATCAAAGCCTGAAGTCAAGC |
| | | | ACCAAGTTTTCTCAGATTCAGGGAGTGCTAATCCTAAGGGAGG |
| | | | CATTTCTTCAAAGATGCTACCTATGAAGCACCCTTTACAGTCCT |
| | | | TGGGGAGGCCTGAAGACCCACAGAAAGTTTTCTCTTATTCAGA |
| | | | GAGAGCTCCTGGGAAGTGCAGCAGTTTTAAAGAGCAGCTGTC |
| | | | TCCCAGGCAGCTTTCCCAGGCCTTGAGGAAACCTGAGTATGA |
| | | | GCAAAAAGTCTCCCCTGTTTCTGCCAGTTCTCCTAAAGAGTGG |
| | | | AGGAATTCTAAAAAGCAGCTGCCTCCCAAACATTCTTCCCAAG |
| | | | CCTCAGATAGGTCTAAATTCCAGCCACAGATGTCATCAAAGGG |
| | | | CCCAGTGAATGTACCTGTAAAGCAGAGCAGCGGTGAGAAGCA |
| | | | CCTGCCTTCAAGTAGTCCTTTCCAGCAACAGGTTCATTCAAGT |
| | | | TCTGTGAATGCTGCTGCTAGGCGATCTGTTTTTGA |
| 1800 | KIAA1210 | 4019326 | GGCTATCCAATGTCAGCAGCATATGGAAGAAGATGGAGAAGA |
| | | | AAAGGAGCAAGTGTTTCAGGATTGAGTGGGTGTGAATTCAAAG |
| | | | GAAGAAGCCTTAAACAATCCAGTGAAGGGTATGGCCTGGGCG |
| | | | ATAGAGCTGGGTCTTCACCTACCAATAAGACTGCCAGGAATGT |
| | | | CCCTTTCTCGCACTTGTCCTTAG |
| 1801 | KIAA1210 | 4019327 | TGGAGCATAGTCAGCTATTATCAGCGCTGTATGCTGGATATGA |
| | | | AACTACTGGATGGAGCTAAGGATGCAGCAGATAGTGAGGGAA |
| | | | GAAAGGCACAAGGGGCCCTTCCAT |
| 1802 | KIAA1210 | 4019328 | TGTTGGCTCCAGTTGATGGCAAGCTGATTTCTAGCAGTATTTG |
| | | | ATAAAAAAATTCCAGTTCCTCAAATTAAGTTGAATAGTTATGTT |
| | | | ACGTTTTTGCCACAAAGGATTTCACATGTGGGTCCAAAGACAG |
| | | | GACATTCCTAAACACGTTT |
| 1803 | KIAA1210 | 4019329 | AACCTTCCATTGGTTTCTGAAGAAGAAAAGAGCATAACCAAAC |
| | | | CAAAAGAAATCAACGAAAAGAAGCTGGGA |
| 1804 | KIAA1210 | 4019330 | CCTTCCAGTGTGGTTCAGTCATTTCCAGGGTATTTTAGAGGGA |
| | | | TCCCTGCAGTGTGTCACTCAGACATTAGAA |
| 1805 | KIAA1210 | 4019331 | CACAGTCCTTGACTGCATTTGCCACACTTGCCTCTACCAGTAG |
| | | | CACCCAGCTGCCCATTGGTTTCAGCACCCCAGCCACCACCCA |
| | | | GGGCTGTTTGGATTCTTCAGCTGCTCGCCACAAAATGACTT |
| 1806 | KIAA1210 | 4019332 | GGTTACAGGCTCCATCACTATCCCACTGGAG |
| 1807 | KIAA1210 | 4019333 | ATCCCACCTGTTATCCAACCTGAAATAATTTCTAAGAACTTGGT |
| | | | AGAAATCTCTCTCGATGATGAGTCACCTAAGAATCCACAAAAG |
| | | | AAGGCTTTACCACATAAGAGTTTGACAGCG |
| 1808 | KIAA1210 | 4019334 | TTCTAATGGATTAAGTGACATTCAGAACAACGAGGAGATTGTT |
| | | | AAAGAAGAA |
| 1809 | KIAA1210 | 4019335 | CTCTGCCTAAACCTAGGAGTAAGGTTCCTGGAGTTGTGTCTGG |
| | | | AGCCATGTCAGGAGCTGTGCTTCAAAATGTGCCTACAAGTGCA |
| | | | GTCTGGGTT |
| 1810 | KIAA1210 | 4019336 | TTCCTTCTATGGATCCCCAGAGAGG |
| 1811 | KIAA1210 | 4019337 | GCAGCATGGGGAGCAAAGCCCTATCCCATGATAGCATCTTCA |
| | | | TGTTGGGTCCTGAGCCTGAAAGATCA |
| 1812 | KIAA1210 | 4019338 | AAAGAAGCCGAAGATACCCAGGAAGAAGAA |
| 1813 | KIAA1210 | 4019339 | CCTACAATGGCTGAATCACTAAGTGAAATTTCTGACAGTCTGG |
| | | | ATGT |
| 1814 | KIAA1210 | 4019340 | ATGCCCTGTACCCAAGGTGATTTACAGCAGGGTTTCCTTAAAG |
| | | | CTAGGTATTTGGAGCCCTCACCTCCCAGGAGTCACCTGGAAG |
| | | | GTTCTGGACTTGCAGGTCCCT |
| 1815 | KIAA1210 | 4019341 | TGATTGCTGGTAATCTTGGGGATCTGGCCAGGATAGTGGGCC |
| | | | CCTCACATCATGCTAGTCAGCTTCTCCTACTCCAAG |

### Example 2: Validation of a Genomic Classifier to Predict Aggressive Prostate Cancer in Humans

[0196] The genomic classifiers described in Example 1 above were further validated as follows. Expression profiles from assays of biopsy and radical prostatectomy (RP) tumor tissue specimens from multiple patient cohorts were analyzed. This included genome-wide expression, treatment and outcomes data from prostate cancer patients treated with RP retrospective institutional cohorts and pathological data from clinical use of the Decipher RP test.

### Prediction of Future Metastasis

[0197] RP clinical validation of the genomic classifiers (DV1 and DV2) ability to prognosticate the development of postoperative metastasis at 5 years and 10 years was determined. As shown in Table 8 below, genomic classifiers DV1 and DV2 were prognostic for 5-year metastasis and 10-year metastasis. Similar results were observed for prostate-cancer specific mortality end-point (See Table 9). Multivariable analysis further demonstrated that the prognostic information in the GC models is independent of clinical risk factors.

TABLE 8
Metastasis Endpoint for Genomic Classifiers

| | | | | Cumulative Incidence of | | | Cumulative Incidence of | | |
|---|---|---|---|---|---|---|---|---|---|
| | | | 5 year | Metastasis @ 5 year- | | | Metastasis @ 10 year- | | |
| | | MVA HR | AUC | Risk Group | | | Risk Group | | |
| Dataset | Classifier | (95% CI) | (95% CI) | Low | Int | High | Low | Int | High |
| Decipher | Dv1 | 1.20 | 0.72 | 2.4 | 5.8 | 15.2 | 5.5 | 15.0 | 26.7 |
| Meta RP | | (1.09-1.33) | (0.66-0.78) | | | | | | |
| (n = 855) | Dv2 | 1.33 | 0.79 | 1.5 | 6.8 | 15.2 | 3.9 | 12.0 | 31.4 |
| (Spratt JCO | | (1.18-1.49) | (0.73-0.84) | | | | | | |
| 2017) | Dv1 + CC | — | 0.78 | — | — | — | — | — | — |
| | | | (0.72-0.85) | | | | | | |
| | Dv2 + CC | — | 0.82 | — | — | — | — | — | — |
| | | | (0.77-0.86) | | | | | | |
| CCF RP | Dv1 | 1.28 | 0.78 | 5.1 | 4.8 | 17.5 | 15.4 | 38.0 | 60.1 |
| (n = 179) | | (1.12-1.47) | (0.67-0.88) | | | | | | |
| (Klein EU | Dv2 | 1.27 | 0.75 | 4.2 | 4.5 | 20.6 | 11.2 | 42.5 | 67.5 |
| 2015) | | (1.09-1.48) | (0.62-0.87) | | | | | | |
| | Dv1 + CC | — | 0.76 | — | — | — | — | — | — |
| | | | (0.62-0.91) | | | | | | |
| | Dv2 + CC | — | 0.74 | — | — | — | — | — | — |
| | | | (0.61-0.87) | | | | | | |
| Leuven RP | Dv1 | 1.26 | 0.71 | 13.3 | 7.1 | 34.5 | 41.5 | 22.1 | 56.1 |
| (n = 61) | | (1.07-1.49) | (0.50-0.87) | | | | | | |
| | Dv2 | 1.20 | 0.74 | 14.3 | 18.8 | 29.2 | 29.4 | 45.5 | 51.3 |
| | | (1.03-1.41) | (0.53-0.89) | | | | | | |
| | Dv1 + CC | — | 0.78 | — | — | — | — | — | — |
| | | | (0.64-0.95) | | | | | | |
| | Dv2 + CC | — | 0.76 | — | — | — | — | — | — |
| | | | (0.61-0.97) | | | | | | |

TABLE 9
PCSM Endpoint for Genomic Classifiers

| Dataset | Classifier | OR (95% CI) | AUC (95% CI) |
|---|---|---|---|
| Decipher PCSM | Dv1 | 1.48 (1.33-1.64) | 0.73 (0.67-0.78) |
| [All patients] | Dv2 | 1.47 (1.36-1.58) | 0.79 (0.74-0.84) |
| (n = 561) | Dv1 + CC | 1.31 (1.17-1.46) | 0.80 (0.75-0.83) |
| (Karnes EU 2017) | Dv2 + CC | 1.33 (1.23-1.45) | 0.82 (0.79-0.86) |
| Decipher PCSM | Dv1 | 1.37 (1.21-1.54) | 0.69 (0.62-0.76) |
| [High Risk: | Dv2 | 1.35 (1.24-1.48) | 0.73 (0.67-0.79) |
| PSA > 20 or RP | Dv1 + CC | 1.29 (1.14-1.46) | 0.72 (0.68-0.77) |
| Gleason > 8 or RP | Dv2 + CC | 1.30 (1.18-1.43) | 0.75 (0.71-0.79) |
| Stage pT3b/N1] | | | |
| (n = 323) | | | |
| Decipher PCSM | Dv1 | 1.35 (1.18-1.53) | 0.69 (0.62-0.77) |
| [BCR patients] | Dv2 | 1.34 (1.22-1.49) | 0.74 (0.67-0.81) |
| (n = 212) | Dv1 + CC | 1.25 (1.09-1.43) | 0.75 (0.70-0.80) |
| | Dv2 + CC | 1.26 (1.14-1.41) | 0.77 (0.72-0.82) |

### Treatment Guidance

[0198] Treatment guidance, including adjuvant radiotherapy and salvage radiotherapy from Decipher RP testing was determined. Table 10 shows treatment guidance data for the metastasis endpoint for genomic classifiers.

TABLE 10
Treatment Guidance-Metastasis Endpoint for Genomic Classifiers

| | | | | Cumulative Incidence of | | Cumulative Incidence of | |
|---|---|---|---|---|---|---|---|
| | | | 5 year | Metastasis @ 5 year | | Metastasis @ 10 year | |
| | | MVA HR | AUC | Adjuvant | Salvage | Adjuvant | Salvage |
| Dataset | Classifier | (95% CI) | (95% CI) | RT | RT | RT | RT |
| ART vs SRT | Dv1 Low | — | — | 0 | 6.0 | 9.4 | 10.7 |
| guidance | Dv1 High | — | — | 7.5 | 23.3 | 7.5 | 31.3 |
| (n = 188) | Dv2 Low | — | — | 0 | 3.6 | 0 | 7.7 |
| (Den JCO | Dv2 High | — | — | 6.6 | 25.1 | 17.2 | 34.4 |
| 2015) | | | | | | | |
| SRT | Dv1 | 1.3 | 0.81 | — | — | — | — |
| intensification | | (1.09-1.6) | (0.7-0.9) | | | | |
| (n = 170) | Dv2 | 1.68 | 0.86 | — | — | — | — |
| (Freedland | | (1.32-2.3) | (0.73-0.95) | | | | |
| EU 2016) | Dv1 + CC | — | 0.8 | — | — | — | — |
| | | | (0.7-0.9) | | | | |
| | Dv2 + CC | — | 0.88 | — | — | — | — |
| | | | (0.81-0.94) | | | | |

[0199] These results showed that genomic classifiers of the present invention are useful for predicting presence of higher-grade disease in prostate cancer subjects. These results further showed that genomic classifiers of the present invention are useful for predicting metastasis in prostate cancer subjects. These results suggested that the methods and markers of the present invention would be useful for diagnosing, prognosing, determining the progression of cancer, or predicting benefit from therapy in a subject having prostate cancer. The results showed that the subtyping methods of the present invention may be used to determine a treatment for a subject with prostate cancer.

[0200] Although the disclosure has been described with reference to the above examples, it will be understood that modifications and variations are encompassed within the spirit and scope of the disclosure. Accordingly, the disclosure is limited only by the following claims.

The application's sequence listing, which the Patent Office published only in electronic form, follows.

SEQUENCE LISTING (1815 sequences)

SEQ ID NO: 1 - DNA, 645 bp, Homo sapiens
  source 1..645: mol_type = genomic DNA
tcgccaggcatttcggggcaaaacgaagcggagccccccaaacccccagacctaaccaagttcagagattcgcagaagcacgccccccaccccaaatttattgtgctctacccaaaatggaataggactaggtttatttacccattgtgagggtagagaggcgagtctggaggagcagggattgggagaaggggtggaaaaatactctgattcttaaaaatactttgtaacctaaagtccttaaattgtggaagaaaggaatactcctcctttccattgtagtctagagttaagatttcaaatccataaattagaggacctaaaattagagggcaattaactgctcattcattgggcccccagtcagcacgggggtgctggaagagatcgggaataatagcgcagaccaatgagcctagggagatgctttcatcgtctctccttccctcaagtgttctggaacctatcatttgaattagccgagtcaggcaggagggggcggggaatccttccgcccttcttaggaggggctgcattgcagggggagagtgaactgacagactcagtcactgaagagggaaaaggagtgagaagacaaagccgtcaaagccccaacagctttgtatttctccagcccggcgcaga

SEQ ID NO: 2 - DNA, 28 bp, Homo sapiens
  source 1..28: mol_type = genomic DNA
gggaccctgtgagtagccagtacagttc

SEQ ID NO: 3 - DNA, 97 bp, Homo sapiens
  source 1..97: mol_type = genomic DNA
agaactggatctgtcggagctggaaggcctgggtctgtcagatacagccacctacaaggtcaaagacagcagcgttggcaaaatgatcgggcaagca

SEQ ID NO: 4 - DNA, 32 bp, Homo sapiens
  source 1..32: mol_type = genomic DNA
gtgatggcctccttgagtacagcaccttcaac

SEQ ID NO: 5 - DNA, 26 bp, Homo sapiens
  source 1..26: mol_type = genomic DNA
tggagagctcccattgccagcatcca

SEQ ID NO: 6 - DNA, 607 bp, Homo sapiens
  source 1..607: mol_type = genomic DNA
tcaagcaatggagtactgggtcacagggattcctcctttcccccccaaatattaactccagaaactaggcctgactggggacacctgagagtagtatagtagtgcaaaatggaagactgatttttgactctattataatcagcttcagagattccttaaaccttcctaatttcctgctccagggcagtaaacacaaatatttcttcaaggggtgatgaaaacctcggaagttttaatttgaggttatctgctacgaaacagtatttctaaaaggctaaagtgataagtctcttgcttttttttgatcctgctcttatattcttttttttcctcagagaaatcaggagggtagttagaggtataaaacaggaggaaatattatggaaaatgaaaatagggaaaataattgaatcattttagaagtagctaatttcttttctcaaaagagtgtcccttcttcacacctactcactttacaactttgctcctaactgtgggttgaaaactctagctaaagaaagttatcaaatcttaacatgcattcctactattatgatagtttttaaggtttcaattcaatcttctgaacggcataagtcctatttta

SEQ ID NO: 7 - DNA, 139 bp, Homo sapiens
  source 1..139: mol_type = genomic DNA
gggagcgcgcccagcatcgcttgggcctcctccacccgctcaggaggggaaacaggagagccgggagcacaacagcctcgcgcgcccgccgccgcctcagccttaggggaggccactacgcctctggttacatttcttg

SEQ ID NO: 8 - DNA, 63 bp, Homo sapiens
  source 1..63: mol_type = genomic DNA
tagtcaggacaggataaacagtcgctatattaagaccatgtacgtgtccctagacctagttct

SEQ ID NO: 9 - DNA, 71 bp, Homo sapiens
  source 1..71: mol_type = genomic DNA
tccgcccacgcctccgtctcctccgcgctccgccacagccggccgacaccacaccagccggggagccgccg

SEQ ID NO: 10 - DNA, 26 bp, Homo sapiens
  source 1..26: mol_type = genomic DNA
ctagtctgcaagccaccgctgtcgcc

SEQ ID NO: 11 - DNA, 32 bp, Homo sapiens
  source 1..32: mol_type = genomic DNA
gacttcgagtgggtctacaccgaccagccgca

SEQ ID NO: 12 - DNA, 26 bp, Homo sapiens
  source 1..26: mol_type = genomic DNA
gtgagggccagcgggcgccccgttat

SEQ ID NO: 13 - DNA, 32 bp, Homo sapiens
  source 1..32: mol_type = genomic DNA
gggccctgcgcggtcgtgggcgccggaggccc

SEQ ID NO: 14 - DNA, 205 bp, Homo sapiens
  source 1..205: mol_type = genomic DNA
cggagccgcgcagctccgacccttccgcgaagaggcgcaggcgcgtccccgagcgcgggagtccccgccaggcccacgccggccggttggggcgaagggtgtccccggctgtgccagccttgagtagatcttttcgctagaagattcctgtgccctcaggtgggcgccctttcctctcaccactccctctcctccggagcgggcc

SEQ ID NO: 15 - DNA, 65 bp, Homo sapiens
  source 1..65: mol_type = genomic DNA
ttggggctgcctgagtgctaggcagggtgtggtcctgggcatccttgggcctaccagcgagccct

SEQ ID NO: 16 - DNA, 176 bp, Homo sapiens
  source 1..176: mol_type = genomic DNA
ggtctcagatgatgcgcctgccatggcctcccaaagtcctgggattacaggcgtgagccaccctgccaggccacatatgatatattttatcaatgccttatctacatgttacataggaataatctagcgtcctacctgtgtaaaaaccaactctggaatactgaaactgagctact

SEQ ID NO: 17 - DNA, 35 bp, Homo sapiens
  source 1..35: mol_type = genomic DNA
ttgatgaaacctgatcccaatttgatatggattat

SEQ ID NO: 18 - DNA, 115 bp, Homo sapiens
  source 1..115: mol_type = genomic DNA
tctggaagttatcaataccgtggcacaggtcacttttgacattttaatttattactttttgggaattaaatccttagtctacatgttggcagcatctttacttggcctgggtttg

SEQ ID NO: 19 - DNA, 134 bp, Homo sapiens
  source 1..134: mol_type = genomic DNA
tggccaggctagtattttgtcagtccaagcagttcattaaaaaaaaaaaaaacaaaaagagcaagaatataaatactgcatcttccagcctacttttacaaagggttcactcttgggtccttaagcttagtggt

SEQ ID NO: 20 - DNA, 25 bp, Homo sapiens
  source 1..25: mol_type = genomic DNA
ctggagtttcctggatgggtgcagt

SEQ ID NO: 21 - DNA, 110 bp, Homo sapiens
  source 1..110: mol_type = genomic DNA
gctgaatactatgacaacctccctcactacaattcctggataaaagtactgtatgattttgtgatggatgatacaataagtccctactcaagaatgaagaggcaccaaaa

SEQ ID NO: 22 - DNA, 29 bp, Homo sapiens
  source 1..29: mol_type = genomic DNA
atatcattagtgccaaagggattcttctc

SEQ ID NO: 23 - DNA, 188 bp, Homo sapiens
  source 1..188: mol_type = genomic DNA
aagagctcggtgataccaagaagtgaatctggcttttaaacagtcagcctgactctgtactgctcagtttcactcacaggaaacttgtgacttgtgtattatcgtcattgaggatgtttcactcatgtctgtcattttataagcatatcatttaaaaagcttctaaaaagctatttcgccaggcacgg

SEQ ID NO: 24 - DNA, 70 bp, Homo sapiens
  source 1..70: mol_type = genomic DNA
aagctatttctagtttatttcactataaagttttgctttattaaaaagctaataaacagctattaatcac

SEQ ID NO: 25 - DNA, 171 bp, Homo sapiens
  source 1..171: mol_type = genomic DNA
ctatataatatggtaacttgggtaccgggggaactttaaaatttcatctcaaaaataatttttaaaaagcctgaggtatgatatagcataaaagattgagatgaaaatatatttccctgtaagctgaattactcatttaaaaattttaacttctatatgggacccgaatta

SEQ ID NO: 26 - DNA, 34 bp, Homo sapiens
  source 1..34: mol_type = genomic DNA
ctgctgaatcctgtacagccttactcataaataa

SEQ ID NO: 27 - DNA, 59 bp, Homo sapiens
  source 1..59: mol_type = genomic DNA
actttgccaaatactttcttcaccaatctcatgaggagagggaacatgctgagaaactg

SEQ ID NO: 28 - DNA, 25 bp, Homo sapiens
  source 1..25: mol_type = genomic DNA
gaaaaaagtgtgaatcagtcactac

SEQ ID NO: 29 - DNA, 34 bp, Homo sapiens
  source 1..34: mol_type = genomic DNA
tacctgaataagcaggtgaaagccatcaaagaat

SEQ ID NO: 30 - DNA, 32 bp, Homo sapiens
  source 1..32: mol_type = genomic DNA
tctggctcggcggaatacctcttagacaagca

SEQ ID NO: 31 - DNA, 316 bp, Homo sapiens
  source 1..316: mol_type = genomic DNA
ttcacgggccacctagactttccagtctaggactagagctgtagcaatgatctgttgtgctgtacaagaaaagagaaagaggtgttcatttgagaacagatgtttttatacatcagagtaaaagctgtattgaagagcaggctgaatcccttccatatagaatgaaatatgagcttgaccccagtccttatcttcagttacctccataccaactggtggcatgttggatttagcatgtagaataatttcccatctcttatttttcccaaggttaatggcatccttctggtacctggcttacatgtgaactgaattt

SEQ ID NO: 32 - DNA, 45 bp, Homo sapiens
  source 1..45: mol_type = genomic DNA
tatatatattcctgtttttactgatttttattgattttgttcaaa

SEQ ID NO: 33 - DNA, 251 bp, Homo sapiens
  source 1..251: mol_type = genomic DNA
ttacctgtctctaacaaagcccatgtacagtgttatttgaggtctccattaatcactgctagatttctttaaaaaattttttttcatagtttaaaagcatgggcagtaaagagaggacctgctgcatttagagaaagcacagaaacgggagaggttcggcgggtccctgcttgtcctatgaactgctcagagctcctgtcagtccagctgggccttctgggttctggcaccatttcgtagccattctcttt

SEQ ID NO: 34 - DNA, 26 bp, Homo sapiens
  source 1..26: mol_type = genomic DNA
cagtctgcaataaaagcacttcctaa

SEQ ID NO: 35 - DNA, 251 bp, Homo sapiens
  source 1..251: mol_type = genomic DNA
ggttctgctcctcgacggcctgaactgcaggcagtgtggcgtgcagcatgtgaaaaggtggttcctgctgctggcgctgctcaactccgtcgtgaaccccatcatctactcctacaaggacgaggacatgtatggcaccatgaagaagatgatctgctgcttctctcaggagaacccagagaggcgtccctctcgcatcccctccacagtcctcagcaggagtgacacaggcagccagtacatagaggata

SEQ ID NO: 36 - DNA, 25 bp, Homo sapiens
  source 1..25: mol_type = genomic DNA
atgggagagctccagtggagaaggc

SEQ ID NO: 37 - DNA, 34 bp, Homo sapiens
  source 1..34: mol_type = genomic DNA
atggtggatcggcagtacagcactgttagcgcag

SEQ ID NO: 38 - DNA, 28 bp, Homo sapiens
  source 1..28: mol_type = genomic DNA
tccatgccaaatgtgatcttgaacttga

SEQ ID NO: 39 - DNA, 88 bp, Homo sapiens
  source 1..88: mol_type = genomic DNA
tcagcgtcagggaaacctggcagcagttaatgaggcctggccatggctgtaggccaggttgggaatcaggaagggtagatgcatcctc

SEQ ID NO: 40 - DNA, 147 bp, Homo sapiens
  source 1..147: mol_type = genomic DNA
actgggagaactagtgaagatgctgaggtgacacagcagacccaggttgttctggaggctctacctgagtttgcatgcagcttagaaactaaaactgtgtcttctcagttgcatggagtggactctcagaaggacatagagattgtc

SEQ ID NO: 41 - DNA, 227 bp, Homo sapiens
  source 1..227: mol_type = genomic DNA
gactccttatcaccaggctcgagcactagcaggagggacactggtgctacgtggcagagaccttcttccagttatcttagcaactggtggatcccagggactccccttagagtttctacattattgggctttcagaactggactcaccaatgagtcagggagacagtgttcctgctctctatctgtgctgagtctgcctatctgggcccatgacaaggcttatgata

SEQ ID NO: 42 - DNA, 95 bp, Homo sapiens
  source 1..95: mol_type = genomic DNA
atgcaggcccaattaaataggcctgtggccagtcttcagcccacagctgaactgcctcatctggcaagaaagagcccatgtaggatcttgagtgt

SEQ ID NO: 43 - DNA, 143 bp, Homo sapiens
  source 1..143: mol_type = genomic DNA
tgtggcggaaagatcccattacctcaaagaatcaatactgttgagagatttgaccaagttcactttgtaaattactgcagcattgtggctgcagctctggaccttctagttcctgcttcttctagtgggtcccaacttcttgc

SEQ ID NO: 44 - DNA, 82 bp, Homo sapiens
  source 1..82: mol_type = genomic DNA
ttgttttcagggcaggccgtcaatcggtgggtgcaaaaatgcagttgccactcagttgctgcccctacgctgctgtttgaca

SEQ ID NO: 45 - DNA, 66 bp, Homo sapiens
  source 1..66: mol_type = genomic DNA
gaaggcaaagtagcagtaagcaacgaaacgatagctcaagttctcatgctaggaggaaatgggtga

SEQ ID NO: 46 - DNA, 78 bp, Homo sapiens
  source 1..78: mol_type = genomic DNA
atacagcatgatagagacaaggattccaaaatcctaggtggagagaacaggaccctttgtgagacagtcatggtcaca

SEQ ID NO: 47 - DNA, 118 bp, Homo sapiens
  source 1..118: mol_type = genomic DNA
cctcatcatggttgtggtgtacctgcggatctacgtgtacgtcaagaggaaaaccaacgtcttgtctccgcatacaagtgggtccatcagccgccggaggacacccatgaagctaatg

SEQ ID NO: 48 - DNA, 137 bp, Homo sapiens
  source 1..137: mol_type = genomic DNA
acactgctcattttgcttgtctgggccatcgccatttttatgggggcggtccccacactgggctggaattgcctctgcaacatctctgcctgctcttccctggcccccatttacagcaggagttaccttgttttctg

SEQ ID NO: 49 - DNA, 275 bp, Homo sapiens
  source 1..275: mol_type = genomic DNA
ttctaattctctggtcatcgcggcagtgatcaaaaacagaaaatttcatttccccttctactacctgttggctaatttagctgctgccgatttcttcgctggaattgcctatgtattcctgatgtttaacacaggcccagtttcaaaaactttgactgtcaaccgctggtttctccgtcaggggcttctggacagtagcttgactgcttccctcaccaacttgctggttatcgccgtggagaggcacatgtcaatcatgaggatgcgggtccata

SEQ ID NO: 50 - DNA, 68 bp, Homo sapiens
  source 1..68: mol_type = genomic DNA
atggacaataaattcttaagcaacaaaagaaaatactgggtcacaagcaactgggtagctctgatgga

SEQ ID NO: 51 - DNA, 454 bp, Homo sapiens
  source 1..454: mol_type = genomic DNA
aggaactagttatcctgtggagatctggacgtctaactatttggacaacacttacattgattgtcactatcatataactaagaaaataggtcattttggcaaaaattttttctttgtctttagaatttgaaactttgaggttttgatttaattacatatgacactcctcttgtctaaacctttcaattgcatttatcaactaccactctttttttttttatcagatcagacctattttagatatcttgctgttctgcaagatatttgttagaacaggcctgcatatgttttctatgaatggagactgaatttaaaacattaaagtatgagattgtttttcatgtgtgttcaccggaatctgtttaagaaactacagcatgttaactctccatctcatttttcagaaacacacgtgcacagtggaagaaatgcacacacagcattgtagccaggc

SEQ ID NO: 52 - DNA, 29 bp, Homo sapiens
  source 1..29: mol_type = genomic DNA
gggctcggcggcgcgggtgaacgtgagcg

SEQ ID NO: 53 - DNA, 111 bp, Homo sapiens
  source 1..111: mol_type = genomic DNA
ctggagaggaggcgctccgcccgcccgccgcgtcctccgctgcttctccgcgcccggctggagcccggcgcccggtcgccccgtcgcgctcgaccccgagggcatgcggca

SEQ ID NO: 54 - DNA, 84 bp, Homo sapiens
  source 1..84: mol_type = genomic DNA
ttggcagtgcaatcagcctttgctaatgggactattccttttaatctggtagctgcagcttcatactcaggagcaagtctcttg

SEQ ID NO: 55 - DNA, 366 bp, Homo sapiens
  source 1..366: mol_type = genomic DNA
gtctgagaaattgtcccggaataaaggggcctaaggagacataacatctaaatgtaatgtagtatcctggatggactcctgcaacagaaaaagaactttaagtaaaaattaagggaatattaataaagtatgcattttggttaataatgtatcaatattggtttattagttgtgacaaatgtaccagaggaatgtaaaatgtcaacaataaaggaaattggatgtggggtacatgagaatgctgtactatttttgcaacttttcttaaatctaaaactcttataaaatttaaaaataaaaagaaatgtggagttattattattattttttggctcaggatttgacccagagctatggtctggcaga

SEQ ID NO: 56 - DNA, 1185 bp, Homo sapiens
  source 1..1185: mol_type = genomic DNA
ccagtttttctcatgtcgtaaagtgtagttctgaaaaacagagcaaatgaaatgcaaagcaggtacttgggtttacatcccagtgccactgatgattctgttttctcatctgtggaagtttcactgttcttgtttcatggagaaattaactaagtgtcagctgtcaggcacactgaactcaggtgatgttcattaatagctgttgtacaatatgtttgtatttggattgctgcttattacttaacaacaggataaacctgaacaatggaaaagaccaacattagagagtattatctttccaaatacacacacctgtaagagaactggaaatgtgagaactacaacttcttcttatttaaacatttgaacaattgccggccctttcaccgaatttacctgtggaatgccttttgagagttagagaactgagaactggtattacttttcaggtcttttgctttccctaatccttgtgatactggagatttatcatctattaaaatggacctagtatttttaaatctgcatatcaaaagcaaattgaatgtctcttgcttccttttaatttcttttaacatataaatttctcttttagcatgtaaatttgttgaattaacagccctttgataatataattcctagttatcagcaataagtacaccagtttcttttttaaattaggagtatgtaattctaaattaattgattctctcattgtacatattatatgcaaggttacaaaaaaaaatcaatggttaatgattttttagctcaaccaagctaaaagatgtgaacaagaaattgaactcaaaacaacttaagatacaaagctcttgttactgataatgtctaataatattcatcaatttaccatatcttgctcttatattaaaatgttctatcattttcctaattattttaaagtcgattacaaaaatatatatatattcttgtagtgccagaaaattgaatacattaataaatggggtagaatagatgaatctcccatgaagaagaattccaaataatttatgaactctgccctcaaggatatggagcagaacttcctacttctctagtgtgagctgaatagtgacttccttccaaaaattacatatggaaagggggaaaataactttgtagtggagaaatctgataaacactatctcggctaggttatcaaga

SEQ ID NO: 57 - DNA, 188 bp, Homo sapiens
  source 1..188: mol_type = genomic DNA
tccttgtggtaatccctagactgggagctcaggtactcttttagtcatctttgtatgtctttagcagagttcttgacatgtggtaggtgcttaataaatgtttgttgtttatcaaattttatggtagggagagtaagtcagcatcggtataaaatcgcttactccacgtaactcttcttctgataggg

SEQ ID NO: 58 - DNA, 29 bp, Homo sapiens
  source 1..29: mol_type = genomic DNA
tctttgctataattatagcttacttctag

SEQ ID NO: 59 - DNA, 30 bp, Homo sapiens
  source 1..30: mol_type = genomic DNA
gtagttctatgacttcaacaatgacaatag

SEQ ID NO: 60 - DNA, 201 bp, Homo sapiens
  source 1..201: mol_type = genomic DNA
gccaacgccataccattcagggagactacatagataccatggaagagcttgctgatttggtgggggtcaggcccaatctgctgtctctggccttcactgaccccaagctggcattacacttattactgggaccctgcactccaatccactatcgtgtacagggccctggaaagtgggatggggctcgaaaagctatcctca

SEQ ID NO: 61 - DNA, 35 bp, Homo sapiens
  source 1..35: mol_type = genomic DNA
gatggcagaaatatctaaagctcaagaggaaattg

SEQ ID NO: 62 - DNA, 28 bp, Homo sapiens
  source 1..28: mol_type = genomic DNA
gtctaaagacattgccctcacagagtga

SEQ ID NO: 63 - DNA, 225 bp, Homo sapiens
  source 1..225: mol_type = genomic DNA
ttcacggagacagctgccatatttgaggatggctccagggaggatgacattgatgctgttatctttgccacaggctatagctttgactttccgtttctggaagattccgtcaaagtggtcaaaaacaagatatccctgtataaaaaggtcttccctcctaacctggaaaggccaactcttgcaatcataggcttgattcagcccttaggagccattatgcccatt

SEQ ID NO: 64 - DNA, 218 bp, Homo sapiens
  source 1..218: mol_type = genomic DNA
aaactattgacctgtggccttatcatatcacacacagaatattattgttacttgagaaatcatatatgcactcctcaaacaacactcttccttcactcctccaacactctccctttcagtgcatccagggtccaacttcagatctgatcttgatctgtgccaacctagtataaattagaccttttccaaacttcatgcatagaccaaggggaagatta

SEQ ID NO: 65 - DNA, 89 bp, Homo sapiens
  source 1..89: mol_type = genomic DNA
tgggagtgcagggatagtggccaaagcacaagaataaggactcttcacactggctaatagtaaagccacctctacccatacattaagaa

SEQ ID NO: 66 - DNA, 88 bp, Homo sapiens
  source 1..88: mol_type = genomic DNA
tcgtgtaggggactacggatatcctgctgatgtgttgttctcttctcgacttacacattttatatggaagatctgtggccaatcatta

SEQ ID NO: 67 - DNA, 130 bp, Homo sapiens
  source 1..130: mol_type = genomic DNA
ttcaaagggcagtacttccacagtcgagactataagaacccagagggattcactggaaagagagtcattataattggcattgggaattctggaggggatctggctgtagagattagccaaacagccaagc

SEQ ID NO: 68 - DNA, 65 bp, Homo sapiens
  source 1..65: mol_type = genomic DNA
atgaatgtctttgatggagtcatggtttgcactggccatcacaccaatgctcatctacctctgga

SEQ ID NO: 69 - DNA, 292 bp, Homo sapiens
  source 1..292: mol_type = genomic DNA
aaggtctcaggacatataggggtcaggagaagaataggcatttagtgcatggagtgtcataaaagcacaggagaagcccaggctttactcaggtgttacagtgccttaggacctggaccaagagacctagtgacttgcacttttctagaagaggagggtacattagcctgccaacactatgttatttttttctgtcttgtggaaattttctcattctgactacagccccaaacagttcttatttgtggagtatgaaaatcaaatatccctgcatgggtcctattatgtgata

SEQ ID NO: 70 - DNA, 30 bp, Homo sapiens
  source 1..30: mol_type = genomic DNA
gaaaaggagccctatagctcagtcacttat

SEQ ID NO: 71 - DNA, 201 bp, Homo sapiens
  source 1..201: mol_type = genomic DNA
tgggcccgtagaagcacatagtgtttccttaacctaagtagggtaacccatatttattattttttataaagctaaaaatcataacactatcctgtttcacagcctctttctttatagttctttgtaaaatgggtatttatgggagccaaagggagattcatttatataaaatgagagccactgaggtgtttttctacccta

SEQ ID NO: 72 - DNA, 656 bp, Homo sapiens
  source 1..656: mol_type = genomic DNA
tgcacatgtatttatcctacccaggcaaaaactccattctttgtcctcctttgctcctcaaaaatattcaagggacagtctctctttcatatattttggctgcagatacaggaagccacctggcagagtgttttcattaccttcatttcacattatttgattgcaataaacagatgaagggaaatgttttccccattacagaagggaactgataggtatgggaactttaaaactctctggttccacaacttgtccattactgcttagcccttttgtactttctgaagtactttccaatatatttgtttacatgaacatcataaaaacccagtaaagtatagctcttgggtagttaactctggtgtagaggggagaacatggaattgcagaataaaaacctgaattctggtgcttgccctaccactaactaacttagatgttagacaagcaatttcctcaatttcaatttttaaaaattttcttgtttgtaaaacaagatgattgtaccagatcacttctgtggttccttcctgctctaaagtattctaggacttttctataatttctgatcacgaccataaaagaattttatggtcagatatttctgacagctggcaaaaagcccaaaccttctgccttctgatcatcctgctaag

SEQ ID NO: 73 - DNA, 39 bp, Homo sapiens
  source 1..39: mol_type = genomic DNA
aattgtgtgggtatctttgtgtttgaagttgtttgccaa

SEQ ID NO: 74 - DNA, 173 bp, Homo sapiens
  source 1..173: mol_type = genomic DNA
aggaagggccagtatttacaaatcagtgatcatcaatacttctaaagagatgatgtgcttcagtgactatccaatcccagatcattatcccaacttcatgcataatgcccaggtcctggagtatttcaggatgtatgccaaagaatttgaccttctaaagtatattcgattta

SEQ ID NO: 75 - DNA, 80 bp, Homo sapiens
  source 1..80: mol_type = genomic DNA
gagcgggctctcttccatcaagtgctgcgtagaagaaggcttggaacctgtctgctttgaaaggactgatgacatcggag

SEQ ID NO: 76 - DNA, 32 bp, Homo sapiens
  source 1..32: mol_type = genomic DNA
gcgacactaacaggtgaagatctcgggagacc

SEQ ID NO: 77 - DNA, 172 bp, Homo sapiens
  source 1..172: mol_type = genomic DNA
tgagatccggtaccgcagcagagcactctcagctctgggtcttgcaggcgcagggctcccccatgccagcagaaagatttcctctggtgaagaggaccgtcgaatctgtcctcctcaagacacctcttgtacagaatttattcgaatgccacggccaaggtcttccttgaaa

SEQ ID NO: 78 - DNA, 210 bp, Homo sapiens
  source 1..210: mol_type = genomic DNA
agcccacgttttattcccatcgagggagggagaatgggtgccgctgagtgggcgggggagtggtccctgaaaggaggtggagtgctacagcccctccccgttggctctcgctgtttgtccgttgttggtttatactaatttgacaacagccgcctgttgagtctcctccagatcgcagctgaaggatctgttgagcgcttcaggaaaggc

SEQ ID NO: 79 - DNA, 154 bp, Homo sapiens
  source 1..154: mol_type = genomic DNA
tccgcccacggcaggagcgaaggaaggccctggcgcgggcgggtaaactgcccaccgggcggcccacccgctgcgcccccggcccgcaagaggcagtcccaataggttggcccgcctggccgaagtccgcccggagcccgctcacctgtcagcc

SEQ ID NO: 80 - DNA, 175 bp, Homo sapiens
  source 1..175: mol_type = genomic DNA
ctgtccttggtgtataattcctacaactggaactgtttgtgcatcttacttaaatttatcagttaatattaggtattatgagttccccttggccttaacccctactcttatcaaagaaacatgtttagaaaatgaagcttatcttccacaggactttaggcataaaatgtgatta

SEQ ID NO: 81 - DNA, 25 bp, Homo sapiens
  source 1..25: mol_type = genomic DNA
gctggtgaaaaggagtaggtttgga

SEQ ID NO: 82 - DNA, 36 bp, Homo sapiens
  source 1..36: mol_type = genomic DNA
gtagtagtattctaagaatcgcgtgatgttttctta

SEQ ID NO: 83 - DNA, 147 bp, Homo sapiens
  source 1..147: mol_type = genomic DNA
aatgttggattagatactgaggctgtagtccctgctgtaacggacatgttggaagctggtgttctagatacttacctgggaaaacactggtctatcaaactcgctgctaatgctgcagtcactgtacttagagtgggtcaggtaatc

SEQ ID NO: 84 - DNA, 25 bp, Homo sapiens
  source 1..25: mol_type = genomic DNA
gaagtaatctctaaactttatgcag

SEQ ID NO: 85 - DNA, 31 bp, Homo sapiens
  source 1..31: mol_type = genomic DNA
actggcagaaatactctggagaaaactctgg

SEQ ID NO: 86 - DNA, 32 bp, Homo sapiens
  source 1..32: mol_type = genomic DNA
agaagtttgctgaggcgtttgaagctattccc

SEQ ID NO: 87 - DNA, 58 bp, Homo sapiens
  source 1..58: mol_type = genomic DNA
atatgatgttagtgaagctaaactcaaaatgggatgtctgaagactctgtaaaacagt

SEQ ID NO: 88 - DNA, 50 bp, Homo sapiens
  source 1..50: mol_type = genomic DNA
aaatagcagtgtactcttgtccttttgatggcatgataacagaaactaag

SEQ ID NO: 89 - DNA, 209 bp, Homo sapiens
  source 1..209: mol_type = genomic DNA
gagatactcaggtggtggtttttaagcatgaaaaggaagatggcatcatttctaccatagtacttcagggctctacagacaatctgatggatgacatagaaagggcagtagatgatggtgttaatactttcaaagttcttacaagggataaacgtcttgtacccggaggtggagcaacagaaattgaattagccaaacagatcacatca

SEQ ID NO: 90 - DNA, 101 bp, Homo sapiens
  source 1..101: mol_type = genomic DNA
aatgaagtatttctggccaagcttattgttcaggcatgcgtatctatttttcctgattctggccatttcaaagttgataacatcagagtttgtaaaattct

SEQ ID NO: 91 - DNA, 27 bp, Homo sapiens
  source 1..27: mol_type = genomic DNA
gtacagcatatggacgaaatggaatga

SEQ ID NO: 92 - DNA, 296 bp, Homo sapiens
  source 1..296: mol_type = genomic DNA
aattctctctttgacatgggctttctttttaagaacccaaggcattgttttgtagagagtctctaaatttagacttgcataatttttttcctttattatattcaggttaaatgtttttgacacatatactacataggacatgttgatcttagtgggtcacatcaagaaccacattatgtcagtttatctcacagtaataatgctaaatttgaccacttagataaggtggtatagataccatcaagtttctccactataaagatattttttcccgttgaagttaatcagtggggtga

SEQ ID NO: 93 - DNA, 338 bp, Homo sapiens
  source 1..338: mol_type = genomic DNA
cacagtgaggaggtctatgcaaacctaccccaaaggctgaggaagctgagaggctgaagaaagaagctgacagattcagtttcttagaaacatttcatagggacttatgaacagaagccatgtctgtctcaggcagtggtgagacaagatggtagatccccataccattatctcctgacccagggatgatataccacaggggaggggcacacatacttcagagcgaatgggtaggagtttgccctaagggtgggatttacagtaagtacatactattaaacaacagattaactggaaatctcagaggtattcccgaaaccagggttgatcagaagtca

SEQ ID NO: 94 - DNA, 31 bp, Homo sapiens
  source 1..31: mol_type = genomic DNA
cagttctttttgcatgatacccaacaacaaa

SEQ ID NO: 95 - DNA, 106 bp, Homo sapiens
  source 1..106: mol_type = genomic DNA
ggacccatggcgagagccatctttaatatcattggcttgtcaaatgggcagttctaagggagcttggccttacctgctctggggaattgcaggttgccacataaca

SEQ ID NO: 96 - DNA, 105 bp, Homo sapiens
  source 1..105: mol_type = genomic DNA
cccaacagagaatagggatacctgcacatagcccttcagtgccagtggcaaatatagggcttcgtttcattacctcagttggcaacatggtgattggtgctaata

SEQ ID NO: 97 - DNA, 44 bp, Homo sapiens
  source 1..44: mol_type = genomic DNA
ttcattctagtatataaaaaagcaaatgactgggtgcaatggct

SEQ ID NO: 98 - DNA, 409 bp, Homo sapiens
  source 1..409: mol_type = genomic DNA
ccaggtatgctgtagaatatccctcagttgggatttatcttatttttttctcatggttaaattggggttatgacttttggggaggaatattataaggtgccattctcctcacctcccatcaagggtacatactatccacattatacccactgtttttttttttttttttggaaacttaaaactcattttatgttattataagtaagaaattagcattcaatatatgccacaatatatctttgttgaagtgtaagtttgttccacttttctatttttcattttccaacttttattttaggttcgggggtacatatgaaagtttgttacaaggataaattgtatggggctggtataactgctagccatatgcagaagattgacactggatcccttccttttgccatatatg

SEQ ID NO: 99 - DNA, 227 bp, Homo sapiens
  source 1..227: mol_type = genomic DNA
agctcgatgggatccgcatcgtgtgcaatcaccaccagctgagtcttcttgttctccaccaaggtggtgattgtgttaacccctgctggaaagacgggtggtgtctcgatgggggtatcccctttgctagcagctttcttctcagtccaggacaacagtctctgcttcttctcttgttttgtctctggtctgtgcttgtgggcccgcgtaagcagtcagtagctgtt

SEQ ID NO: 100 - DNA, 311 bp, Homo sapiens
  source 1..311: mol_type = genomic DNA
cgtctgattgcctgaactgcccgtcaaggaggtggcatgtgttcatcattcatttattatttaatcaacatcgactatcatgtgtcagacactccgctgggccctgggggttctagaagtaagacttgttccgtgccctccagtgattcacgataagatcaaactgttcttgttcggtttacctagtgataaattgatttagtccctgaaatccctttcttactgcctgtgacctgtaggccaaaattgggaacctctgaatagtagtaaattaaaatcaccaaagacgtcattgtggcagtgggtatctc

SEQ ID NO: 101 - DNA, 626 bp, Homo sapiens
  source 1..626: mol_type = genomic DNA
gaccactgggtcttgggaatcagtaggggctgtatccagcacaccactgccccatcctttttttcttaactattagtgttgaataaacttctcatagttaatctacttgctgaactcaggaaattcctatcactgaccctggccagggctttaaagggtaggaaaagcattaatgtcagtcctacacagcgaacttttgatttagaagaatgtgacagaaagaaaacatttactgaaatacatgggaagcttgcatatttctaaagttgtctttatacttttcatttctcaaagctaagtaaactgtggtataggcatctctaagatgttagcatttaaaacatcaattgttttattgatgtttaaacaattgtttaaatcccactgaaaaatttaaatattaaaatatcttgcacagtctaccaaatgagttaaatcgttacagtcgtgtctacctcttatttttctatctgtatttaggctgctgttttggtgagattctaatttctttttcccctggaactactttctgtggaagacaaggaacagactggggacagaggcctgaaaacaaattggaagcactcagagatctattgctgaccagccctattcctcatgagttg

SEQ ID NO: 102 - DNA, 1295 bp, Homo sapiens
  source 1..1295: mol_type = genomic DNA
ctccagggtgacaaatgccaatagatatgtgagttaatttttttaaatatctccgtgagttgtaaatagatgtgtatttgatctgccctatccttctttgattctttaacatgttctctctcttctgtttgcaaaatatgtttgaaagcattggtagtgctttccttatcagtaactggagttctcctgcttgcactagagaaggtaaagagagaatcagtattcttatatggcaatctggggaagcagcaatatgccactgtacaaaactgaagaaaagttcctaatttgtactttgtgaagggagatgaaaggacgtttaaagtatatatattttgtcaagaggaaagaagataaaactatgccagttttatatcaatagcttgtagaagctcagctcttcttggtcttggctagactgcctagattcccacagcagacaaggttgagaatccattgctggaatcttggtattgatgagttacagtgatggaacatgtgcttggccacaggcaggtccagtcactgcaaaagtgaccaagccagcaggtcacccttaacttcagaaacaattattggtggtgaactgtacttaaattgcagagaaacctgtaagtaatggaaggtaaagaaaaattacagaatggaaaataatattttgggcaagcaaacaaattcactgagaattccaaaagtatattaaaaaagaagatagctatgagttcagatctatcttattggtctttaatattacaaccaatccttaactttccactataaaggaaggattactagattgattactttctggatagataatctggtaataaatgataggtaaatcaaaaattacttttatttaggagtttgaattcttactctcatcagacattttttttctagggacgcttactaattaaatgatttaagttgtttcttaggggttttttgcctatatatttatgactgtgttaatgagtagtgaaatgatgcggaaagacagctatcaggaagaggaaatacagaagcctgaataatctatgggttagaaaagcatccctgaataatcaaaaattggcagtattggcattgttctcaagcctttttatgaaaatgaaatctgaaatcaccaaatgtaaacctgggaacattattctagtgttgctgtcttggattcatgttaagaagcgtcttcattctttgctcatgttgcccacttcttgtggatttgtctgagtgttttttgacaatcacttccttaaagactcttctgaactagttggacctggttaatc

SEQ ID NO: 103 - DNA, 2379 bp, Homo sapiens
  source 1..2379: mol_type = genomic DNA
ggtcaccgtaggagttcagactttctttcataagtgtgcattattttacatgtgcaaatcagaatatatttaaaaaaaagcaaaagaaattcaatggatggattaatatttatccccctttgggatattttaaaatctactaaaatgaggattagtaatataatgacctgctaatatattttaagaacatgttttaaaaagatacactctatcacatatttaagcaaacatcacatttggagaagaggaaatcataaaatcatcctagaagactatctgagagaaattctgttgccaccagttatacttgacaatttagttgaagctcagaaagttatattcatccctcttagctgtagtctatattagggcagttctctagaacgcccacatttccaccaactcagtaaacttgaggggagctggttggcacctcgtgaagaactctttccctgtcgtttgcagtaacaaactccagtctgttgcagtaacaaactccagtctgttgcagtaacaaactctagaatattgacattctctgtgggggaaaagcagtgtccactggaccccttctggtactggatgtgttctttacaaaggctagctcagtccaacactgtgtttacatacactcgtgcttttccttatctgacttctcattttgtatcagaggcatatcataaattgataattttgcaaaatgcacttttttgagatgcagatatagcaaaggattagtaatatagcctgaaaacaaatgggagcatagcagtgtgtgaggttctcgagaactgtcttgtctctgtgtgtttatttgcctgccagtgctctccagcgccatcctgccctggacaccaccctgacgtgatgcctctattgcagctcagaggctttattttttccattttgacattggcactaaatgcatttggggatggttaaaacaaattactatagaacatttaaatgatcagtttaaggggaaataggctagtttatagaaaaataagagctagtggcttataatggtgacaggttctcatgtggcacccctaggacctgtgcagacagtagtctgttgaatcattacatcaaggagctgcccctgtcagggtgagtgtaattaggaacgataccagcacataaggctccccccaatctcttccagttgctttttcttttttcttttttttttagacaggtcttactctgtcacccaggctgtagtgcagtggcataatctcagctcactgcagtctctgcctcccgggttcgagcgattctcctgcctcagcctcccgagtagctgggactacaggcacccaccatcatgcttggctaatttttgtatttttagtagagatggggtttcaccatgttggccaggctggcctcgaactcctgacctcaggtgatctgcccacctcggcttcctaaagtgctgggattgcaggcgtgagccaccacgcccggcctccagttgcttttgaagagggtaaagtcaagtttctatttctagaaaacattttttagaaatttgttgcgatgtttgtacaatttacctcataagagaaccacacccttctccaaaagtgctggtactgcatcagtgagatgagtagggtttttgtttgggattgtaagactattaagatcctagtaagtcagtggtagtttactgtgatgtgagcattgtagattcccccgttgtcactaatcacacaacaattttgagaagtaggctataaaacaaaaaaaggttgctgttttctatttttaaataaaccaaaaaaaaacagaaaagatgtgaattttccccagttatgtgggaaaggtaaagcaacaccaaataaaagcccacagcagcttcatctttacgataactcagtgcatatgtgaaagagaatgatgcattaactgaaatacctcattgaatattatactactactggtaaaatgcagaagacagtgttaatgtgtttggtttggggactggttgttataaaatgcaatttttttttaaatctaagcatttcattatgtgttctacagtgtcggtgaataaatgaaaccaatctcaatttagaggtatggatgatgacagaaagcccaatagaagcttaatgatgcttctgtttgaggcccagcaagcaccactaaattactggatgaaatgaaattgttcacttgagggattagtcaaccatctgggggagaagttgctcactgtcaaatacagcatgcacggtcctagctgatagaccttttcctcattgctacagcaagccacagggtagagtgaccagttctcctatccaaaaataaatgcgaacatgcatacataaatgtggctgagggccacttttgccatcactgtgc

SEQ ID NO: 104 - DNA, 38 bp, Homo sapiens
  source 1..38: mol_type = genomic DNA
gtacaacatcattcagtatttttaccattgcctgtttt

SEQ ID NO: 105 - DNA, 63 bp, Homo sapiens
  source 1..63: mol_type = genomic DNA
gaccctcagcaacttgtggatatttctcatacagtcttttgcatttttgtcaggctatatgtg

SEQ ID NO: 106 - DNA, 56 bp, Homo sapiens
  source 1..56: mol_type = genomic DNA
ttccaattaaagatgtacccctggagactgatgaccttaccacttggctctatcag

SEQ ID NO: 107 - DNA, 259 bp, Homo sapiens
  source 1..259: mol_type = genomic DNA
ctaatggacctgaactcttgaaagataaagactaaagcaaacacaagaaggtgacatggaggaccagactatacagggcaaggtctgcttctagaattcctaatagtacatgggggttcattaacctttttctctcctcttgtgaatgtttaaaaatttccattataatttaaaaaacttattataaacataagatattgtagcaataatacaataatagcatactataaaaaagactgagaacaataggagctcttta

SEQ ID NO: 108 - DNA, 389 bp, Homo sapiens
  source 1..389: mol_type = genomic DNA
caaggtcacgcaactggcaagtggtagagtcaggattcaaccccaggcagtctgcccaatagctttttttttttttgagacagaattttactcttgttgcccaggctggagtacagtggtacgatctcggctcactgcaacctccgccttccagtttcaagctattctgcctcagcctcccgagtagctaggattacaggcacctgccaccacatctggctaatttttgtatttttagtagagacgaggtttcaccatgttggccaggctggtctcgagctcctgacctcgtgatctgcccacctcagcctcccaaagtcctgggattacaggtgtgagccaccgcacctggcgtgatagtttgtatgcttaatcactaggccacactg

SEQ ID NO: 109 - DNA, 27 bp, Homo sapiens
  source 1..27: mol_type = genomic DNA
gaggagatgtaagcctagcattatatg

SEQ ID NO: 110 - DNA, 220 bp, Homo sapiens
  source 1..220: mol_type = genomic DNA
ggccctaattggttatgagcccattgctacaccccaatacttgtcatgaagagaatgatatatgatgacaggtctgacatgggtttttaatgagaagggtgccaagactaccagaattggctgagtgataatagattggcagacatttgcttgggataaatttattttgttttttaaagaaaagctagataatcctttcccttggtgagaggattcctgc

SEQ ID NO: 111 - DNA, 418 bp, Homo sapiens
  source 1..418: mol_type = genomic DNA
tgtttgtcagctcacattttggagtcttgacgtaaaaattcaaatgctccaactccagtatagggggtgccagctgctaagtattattttacattttttttgaaagtgtaatttcatctagtgcttttaaatctgactatggattttggtagtatattctctatttaagagcacattctgaattactgataataagaatgttcatttcttgaaaattaggagctagtttttcatttgggtagctattggtattgtaaaggtttatttctggtgtatatgtatttacttatttaaatcccacaagcactcctctgatttgatttcaagaggactggtattcaatgtatttaatcctttgccatattaggggattagtcattttaatattttaatcctatggtgaccaatcagagtaata

SEQ ID NO: 112 - DNA, 62 bp, Homo sapiens
  source 1..62: mol_type = genomic DNA
gccttttagccttactatgtttccatgtgaaagacctcaacccgtggcaactaccaaggaca

SEQ ID NO: 113 - DNA, 76 bp, Homo sapiens
  source 1..76: mol_type = genomic DNA
acagcaaatcaaaaggcctccagtggataatagatacaacgatagcttatcccaaagctgaacctatagatattca

SEQ ID NO: 114 - DNA, 139 bp, Homo sapiens
  source 1..139: mol_type = genomic DNA
cagagatcgaaaatggattgttttgtttccagaagggggcttcctcaggaagaggcgagaaacaagtcaggcatttgccaagaaaaataacttgccatttcttacaaatgttactctgccaaggtctggggcaacaaaa

SEQ ID NO: 115 - DNA, 154 bp, Homo sapiens
  source 1..154: mol_type = genomic DNA
tcttgagaacttaatagctatcttaatcataatcagttcacttcagcaaactgactaacaaaatgtcttacatgttttgcatttgggatacatttgatctaaagactgaaagcatactaattattttgaggagtttctgtaattttgttggctg

SEQ ID NO: 116 - DNA, 162 bp, Homo sapiens
  source 1..162: mol_type = genomic DNA
gagaaggcagcggaaccaacaattagaaagcttagcagtctcagggatccgaaaagctagctgagcaccttacctcatttccagctttaggaaataattgaatttacagtgtagtgtaacagttgattctaatgatgatcatcaggcatcaagaagaggggc

SEQ ID NO: 117 - DNA, 25 bp, Homo sapiens
  source 1..25: mol_type = genomic DNA
gatgtggttgatggatcatattttt

SEQ ID NO: 118 - DNA, 96 bp, Homo sapiens
  source 1..96: mol_type = genomic DNA
ttctctatgctgataggcagtctgcactaagttgagcataaatatggtgacctcctgggagcagtgaacaactaggtcacacaagaagggtgaacc

SEQ ID NO: 119 - DNA, 27 bp, Homo sapiens
  source 1..27: mol_type = genomic DNA
cgaggccatccaggacaacagggtgaa

SEQ ID NO: 120 - DNA, 26 bp, Homo sapiens
  source 1..26: mol_type = genomic DNA
gcaacaggagatgtgtgcacactgat

SEQ ID NO: 121 - DNA, 921 bp, Homo sapiens
  source 1..921: mol_type = genomic DNA
acacagtaggcatagggctcttttagttactagtgattccaaaagtgactttaatcccattactcaggatctctatggtactgtcaattagatcttcctcatttttgcaacatgtttacgtagcattaatgatattattgtttcataagtgagaaaatgaagacacagaaggataaaatagtttgttgcatcagcttgcgggcataataagcaacctttcttctctctgttaattctgttttgtaggccagtataatggctttagtgtcactgttgttaaggagtttttgatgggttgtttctattttctttttgagatgtgaactgtccagattaattctaatctataacttttgggaaaagtatattgatatacatgttagaatgtgtgtgtgtatgtgtgtgtgttgtgtgtatgtagtagatgataacctttagctttggttttcaataagaattttaaaatttattacaattagaaaatttttcctccagtttttattcagttgtcctttttccctttggaaatagtggacctgacccaattcttttttgagaattcatttcatagagcagcgtgttagaatatttttgttcttctaatcaagtgcagtgtaagaactgtagacatccataatttcttttctatcccttggttaagatattagctttattactatatttactggtcctggaatagcaaggcataatctgaggagcatagctacttcatctgtgtaataaattgctctttcactacaaacattttaatactgattttgttggtcatttaactttctaatagtggtccttaaattatgctctaaaagaagaataccatatatattggaaattaaatttgttgttgaataaaattagaattattataaaattcaacacgaccttattgctacctcagga

SEQ ID NO: 122 - DNA, 362 bp, Homo sapiens
  source 1..362: mol_type = genomic DNA
cctacttcctaactatgtaagtttgaaaacagtgcttaaccttttgtgcctcattttcctcatttgcatattggggatgatactatctgcatatttggaattttgtgaagattaaatcagaaaataatgtaaattattttctattactaagtactagtgcatggcacataataaacattccataaatgttagctattaagattattatttatatatctatttaataatatctgctactattattattttagttatgtaacccctccaaaagctacctcttgagccttgctttctcaaattttaacctcttaaaatttaagagtcaaagggacactgaccatgatttcctagtgtgtacaatg

SEQ ID NO: 123 - DNA, 245 bp, Homo sapiens
  source 1..245: mol_type = genomic DNA
ccttgtttcaagctggaagtggggataacatagagcccttcacacatctgcttttctcatccccttcaactgtctgttcttgttttaagagtgagagattaaaatgttgatttgtagccaagcaagtggctgtggcttatcaacattgagcctcactgtagggtaatcttattggaatatttcactggggaaccccaaatgtcagtatttttaggtctttcctcttgaggtgatcaaattcccta

SEQ ID NO: 124 - DNA, 615 bp, Homo sapiens
  source 1..615: mol_type = genomic DNA
ggtgaagtgtccaagtcttttcttaatttttttaattgggtagtttgttctcttaatgctgagttttgagaggttttttttttttttttgagacggagtttcgcccttgttgcgcagactggagtgcaatggcgtgatctcagctcactgcaatttccacaaccctgcccgggttcaagtgattctcctgcctcagcctcctgagtagctgggattacaggcatgtgccaccacacccggctaattttgtatttttagtagagacggggtttctccatgttggtcaggctggtctcgaactcccgacctcaagtgatctgcctgccttggcctcccaaagtgctgggattacaggcgtgagttttctatatacttgggatataaaccctttgttggatatgtgattgcatattattttctctcattttattctcttaacagtgtcttttcctcattaaaatgtttacattttgataaagtctaatttattgatttttttaaaaaaattgggcagcccccaagccagaataggttgagagagactccccagttcattgatgttattttcttttatggcttgtgtttttcatgtcatgtctaagagtactttgccca

SEQ ID NO: 125 - DNA, 34 bp, Homo sapiens
  source 1..34: mol_type = genomic DNA
ggtctgatttgttacctgatgctcacagagtact

SEQ ID NO: 126 - DNA, 187 bp, Homo sapiens
  source 1..187: mol_type = genomic DNA
tttctttagtaggaagtgctgtacagatatctcacgttgaggaaatgctttatattgcctttgtcttaatatttcaagggcaaaccaaaagagatactagcttaactaatgatccacttctgcatgctttatttggatctaggataaatcagtaccccaccccccggagtttaagtgatgattggta

SEQ ID NO: 127 - DNA, 26 bp, Homo sapiens
  source 1..26: mol_type = genomic DNA
cattttatccacacacgcaagagaag

SEQ ID NO: 128 - DNA, 26 bp, Homo sapiens
  source 1..26: mol_type = genomic DNA
gtaagagtgagaacacttttctttaa

SEQ ID NO: 129 - DNA, 176 bp, Homo sapiens
  source 1..176: mol_type = genomic DNA
aggtttgccttcatggtcgtcaacaacctggttgctattccatcctacatctgctatgtaattatacttcagccccttcgagtgctggacagtaagcggttctggtatatcgaaggaatcatgtataaatggcttttaggaatggtagcttcctggggatggtatgctggatatac

SEQ ID NO: 130 - DNA, 535 bp, Homo sapiens
  source 1..535: mol_type = genomic DNA
ccttgccctctggtcggaaatctcattctcttcatccccagttccttggcttttacctctttctggcttttgctcccttccccctactcctgtccttcctctttttcgcattataaccccctactttcttcctctcaccttgtaagctttttttctaggccccccattttttttcttaaaaaaaaaagggaaacaaaaaccctattgctacaaatgagaattttgagggtaactcttcgctagagccagagaccttttaaaggaatgcatcggtgtgcaggaatcgtggtggtgaggagactgaggtcctcagtatctgggaaatcttattgaggggaccctgtttcggtcatgtcacttgtgtcttcagtttggagatcctgaggttgtctgaagcgagtggatctatttttctaagtccaatagacgaccgcagtgagacacggtgcggggacggccaccgattactgaatgggaattgtgttatcatttgctaaatatattgtgacatacttcgtgcctcggtgaacagctc

SEQ ID NO: 131 - DNA, 97 bp, Homo sapiens
  source 1..97: mol_type = genomic DNA
cagccgcgaggggagtagggcgccagcgcgcccgctcgcgcagcgcctcgggccgcttgggccgccaccgcgtccatgaccgcgacccctcggcggg

SEQ ID NO: 132 - DNA, 130 bp, Homo sapiens
  source 1..130: mol_type = genomic DNA
ccttggggaccgagtctcggcgccgccggggaacgggcgcgggccgcgccacagccggagcggggcagggccccgccaccgccttcttccgccggccccgccgccggccatgcattcttccggctcctct

SEQ ID NO: 133 - DNA, 199 bp, Homo sapiens
  source 1..199: mol_type = genomic DNA
tgaggccagtaagcccaagaacttaaatgaacattcttatactttagtttgcattctcagagctggggaactgtctgtaggcacagaagatggaaaagggattttctggtctgtttctgactttaagttacacattttaaaaagtactctgaagacactggggtttgttcatccccggcttgctactaaagtagtaatg

SEQ ID NO: 134 - DNA, 239 bp, Homo sapiens
  source 1..239: mol_type = genomic DNA
tgccaaaggaattctgctcagcagattaagtatgttcatgttttagaataaaaattgccaaaactttgttgagaaaccacttatgaggaaaccttaaatactaattaggaagctaaaaattgaatattggtatattggtatagaatgaatatatatatatatatatatctttttccaaattatgacattccgtgtaatatgagtgaattactcagctctgctgatgaggacttatgttg

SEQ ID NO: 135 - DNA, 1655 bp, Homo sapiens
  source 1..1655: mol_type = genomic DNA
ctatgcaatcctcgaactcagtgtgcttttccctgacaggatatataaaaaggtagattaggtcaaccctcctttaagcttactctcccctcaccttttcttttcactgtatataaacggtactttctgtgattcataccaacagaggactttctgtgattcataccaacagtcctaaactgtcattttctaaatctgggatttaaaatctttagacaatatttaaaatcttgattttttttaaatgtcagcagatacaatttggaagattgcatctgtgtagaagtaatgcaggtacaagatctagagtttttccttagactctttagtcttttctgaattaaagaataagtgctcttaaatccatattttatcctgtcaaagtctgaaatgtgttcattgatgatttggtgacatctaaaaaattgtatttagttggcttggctcacccctcttaaaaatacttagccatctcttggtgggatgtggtgggggtattaaggtctcagagttatttattttctcacctaatttcaaacctttataaacttggggttttgttgttgatggtggtagtattttttgttaagttgtttaaaaggctgacttgattggagcctcctctactttttcttgagggttgcaagtattgtatggtgggggaggggggccttaaggcaaactgtctaaaaagtgactatccaattaatttaactagtaaattagtaagaattattcttagtattcactcagagtttaagatgtgaaaaatctgcactttgtttatcactctaaatgtaaagaactttttgatagtgttatttcaccactccctcagttaaaggctattatttaaactgtttactggagaaaatcctcgctcatgtccatttattgtttttttctgtactgtgatttgtttcaagcttaggaaaactagtatattagagtatgttctaggaaattaaaagatctggttagagtaaaaagttctttttaaggttcttaactaattttttcacaactaagaaaataaatgaagtattcttaggctgaaattcatcttattttatcataaattagattgtaggggcagcctacatttttgtgtatgtgtttttatttcttaaatgattgtgtgagcctggtgacattttatggttcttgtgatctaaactgtttttccaattcacatcttttgtcgtgaagtgatattatactagagtactgtttgcattgtaaaaatgctttgctggtgctctggcattttgtctttatctcatcacctaatttaaaaacccagcacttgataatataactgacagaaatgattgtacccactgatgaagtaatgaaaatgaagaaaaggaaaatattccttccttcaatggcgtaagtttattttttacttaagtggcatctatgtaagttagacaaactatatattaaaattggtaaactttgaatgtttctcctgttttgattcttagattatgaggaggatcagacagaataagactccacacttttgaaatttgataagtcaaaacgttttattttgacatttttaacattgtgaattattcgatatttgtaatctctgtatgtatatgaaactctgccatgtttttcaactttgcctatgtgccactgta

SEQ ID NO: 136 - DNA, 279 bp, Homo sapiens
  source 1..279: mol_type = genomic DNA
ctagggaacaaatgttgctcagggctggtgtcagtgagaaaaatttatcaatgctttttaatgtgtttttacccttgcctcactgtgtgtgtgtcactttctataatataaagaaatactataatatttctagaatctggaactgtcaccatgatgaatggccctttcaatgcatagttacagaaattcctgaagattccccaggacttcaatttcattggtttttatttgcagtttttagttgctgtaattgttgctgtttccagtctaaaggacctc

SEQ ID NO: 137 - DNA, 89 bp, Homo sapiens
  source 1..89: mol_type = genomic DNA
agagacataaagtgactgtggaaagccttttaattatggacattcatcagaaagacactaatctgacttcaagaattctgaactattaa

SEQ ID NO: 138 - DNA, 25 bp, Homo sapiens
  source 1..25: mol_type = genomic DNA
tttaaagtcttattacaacacagta

SEQ ID NO: 139 - DNA, 396 bp, Homo sapiens
  source 1..396: mol_type = genomic DNA
gtactaacttagagaggccttaatgctgacaagtcagtttctctacaggtcataggaaaaactaagtttccaattgccagtgtttttcagtttgctgccttaattttgtaagggagatattcttctaatattctttttgcttggctataacttgttcaactacaatagcaggagtaaggaatgtgtgattgagaaggtgataaaagaaaattaaaaccttcatctgctccttatttttcttaaattttcattactatttttttcttttctcacctttttcctgcactatgctctttatttctgaagctcagaggtcatttttctttcactcatttctacatgatttacttctgtatagagacatataatttgcttgcttgtttatatcaccagtgg

SEQ ID NO: 140 - DNA, 105 bp, Homo sapiens
  source 1..105: mol_type = genomic DNA
aggaactgccctgaagatattattctctgaaaaagaaatccaaaagcttccagagaatagtccatctaaaggcttccaactcacccgacaggaaatagttgctct

SEQ ID NO: 141 - DNA, 88 bp, Homo sapiens
  source 1..88: mol_type = genomic DNA
tgtgtctatgtttctattgatacaataccagattcatttgtgaagttggtggtcattacgaaccgagtatatccgtattttacatatg

SEQ ID NO: 142 - DNA, 38 bp, Homo sapiens
  source 1..38: mol_type = genomic DNA
acatttcaagaatatctcccgtataatggactgtgttg

SEQ ID NO: 143 - DNA, 61 bp, Homo sapiens
  source 1..61: mol_type = genomic DNA
gtcctttcccatgcactttgatgagaaatccatgtttgcaggtgacaaaaaaggggccaag

SEQ ID NO: 144 - DNA, 116 bp, Homo sapiens
  source 1..116: mol_type = genomic DNA
tttatacttgattgagcttcgagctttgtcaaaggtggctccatattttgagcgctcaattgtcgatctttacactggaaatgcagaagaagatgctgacacaaaaactcttctac

SEQ ID NO: 145 - DNA, 80 bp, Homo sapiens
  source 1..80: mol_type = genomic DNA
ggagaaaagagtcttctataagcttatatcgggacttcatgctagcatcaatttacatctatgcgcaaattatcttttgg

SEQ ID NO: 146 - DNA, 150 bp, Homo sapiens
  source 1..150: mol_type = genomic DNA
tgtcatatacttttagggaggaagctacaaaataaaattcaatttcttttggtccccatccatgacaatttgaatattctagcaagaattcccaattagggaacgagaactcaaaagaattattttttctagttagaggccacgtgcttc

SEQ ID NO: 147 - DNA, 27 bp, Homo sapiens
  source 1..27: mol_type = genomic DNA
agcatatttttgtaaggtctaggattt

SEQ ID NO: 148 - DNA, 27 bp, Homo sapiens
  source 1..27: mol_type = genomic DNA
gagaatcattctacacatggctagaag

SEQ ID NO: 149 - DNA, 235 bp, Homo sapiens
  source 1..235: mol_type = genomic DNA
agaggccatattttttagtacgttgggtactagacttttcctgttggcacttgaggtgttttgaatcacaagtgatataatgataaatgatccttactatatgttgaatgaattaatttgttagacgttttcatttttgtacaaagtatgaagactctcaggaggcaaagtaattccccaccgtctagtttatccctagactccttactcagctcatctgagtgttcggtttttc

SEQ ID NO: 150 - DNA, 86 bp, Homo sapiens
  source 1..86: mol_type = genomic DNA
tttgtttgtttcaagtgtggaggaaattttttgtaacaatcagaatttgatttttcctttatggaattcaaaagaaagtattcctg

SEQ ID NO: 151 - DNA, 163 bp, Homo sapiens
  source 1..163: mol_type = genomic DNA
cctggccaaaatgtgcaaatcttatactctttgacctgtattctgattaagaggactcatttgcagggcgtctactcagtgaccaaggtttgtgatataattaatagtttaacagttttaatctcaaaaaatagtattgggatctgagctatgtaagacattt

SEQ ID NO: 152 - DNA, 46 bp, Homo sapiens
  source 1..46: mol_type = genomic DNA
gcctcgatctgtttatcgtcctttaaatcctctggcgcctagccga

SEQ ID NO: 153 - DNA, 417 bp, Homo sapiens
  source 1..417: mol_type = genomic DNA
aagaaggaacgactgatagagggtcgggagaggccgggtgctgtggctcacgcctgtaatcccagcactttgggaggccaaggtgggtggatcatctgaggtcaggagttcaagaccagcctggccaacatggtgaaaccccgtgtcaactaaaaatacaaaaaaattagccgggcatgatggcaggtgcctgtaatcccagctacttgggaggctgaggcaggagaatcacttgaacccgggaggcagaggttacaatgagcagagattgcgccactgtactccagcctgggtgactaagtgaaactctgtctcaaaaaaaaaagagggtggggaggggagtatttgtttctattggaataaaattatacactataaaagttaaaacattctatgtttgggtattatgctttcttt

SEQ ID NO: 154 - DNA, 93 bp, Homo sapiens
  source 1..93: mol_type = genomic DNA
gctgctcagtatgtagacctattgctgaacccagagcgttacactggctataaagggacctctgcatggagagtgtggaacagcatctatgaa

SEQ ID NO: 155 - DNA, 221 bp, Homo sapiens
  source 1..221: mol_type = genomic DNA
cctgcacaacaaagtaagaccacttttcttaaaaaagaacaatgaaaaacctgatataattgattttcctcttgtgattttttagctcccttaaagtatattttaaatcatcatggtttaatatctgaatcatggtttttcttctttattggttatttggttggttttcttgggaaaagaggttggtactagtccaatttgcacgtttgtagaggattcta

SEQ ID NO: 156 - DNA, 43 bp, Homo sapiens
  source 1..43: mol_type = genomic DNA
ctggggaggactctaattcgacttctccacagccctttttcca

SEQ ID NO: 157 - DNA, 60 bp, Homo sapiens
  source 1..60: mol_type = genomic DNA
caaagaagctttcattgactgggcaagatatgatgattcacgggatcacttttgtgaact

SEQ ID NO: 158 - DNA, 186 bp, Homo sapiens
  source 1..186: mol_type = genomic DNA
tgctactagtagtgtatcagttatctgttctacaacttctccagtgattggtactatgatttttaaacagctttactttgaggtataatgaaatatgatacactgcatataaagtatacagtttgatgttttgacatgtgtccacccatataacatcatcacaattaagataccataggttgggtg

SEQ ID NO: 159 - DNA, 622 bp, Homo sapiens
  source 1..622: mol_type = genomic DNA
atgatctagggactaggcttaagtcattggaagattttggggtaaattgccagtttatattctttgtcatttttttctccattgggttggattttaaaattattactgatttgtaagcattctttatataatgtgataattctttgttggctgtgttgttaggatttgtcctttaattttgcatatagttttttgttgttgaacagaaattattctttaaacttaaaaaatttaagtataatacacatatggtggaatagaaaattcttaagtgtaaaggtcaatgtaactttacaaagtgaacccaactctatagccaccatccagagcattatacttgctgtccagattaccatgtgtactttcctagtcattatcaccttccaaagttaaccgtgattttgagatactgacagagattagttttaactgtttataaatagaatgatatagaacatattctgttgtatctggcttctttttgttaacatgtgtctgagattcattcatgtttttgggcatagtaatgtttaattcttttttattggcacatagtattctatagtaagaatgtgccatgtttccattctgctcttgatagcttatgctttggggccatttc

SEQ ID NO: 160 - DNA, 26 bp, Homo sapiens
  source 1..26: mol_type = genomic DNA
gagcaagctaataaactgggagcaat

SEQ ID NO: 161 - DNA, 35 bp, Homo sapiens
  source 1..35: mol_type = genomic DNA
ttccggttggaataaaagctgggcattctaataag

SEQ ID NO: 162 - DNA, 129 bp, Homo sapiens
  source 1..129: mol_type = genomic DNA
atgttccagctacatgcacttctcccattggtaaaccctagattagattggtaaactctaggttaatcgtgtgggccaaaaaaagctttctagtaatccaaaattgcctacactttgttagagcagaag

SEQ ID NO: 163 - DNA, 79 bp, Homo sapiens
  source 1..79: mol_type = genomic DNA
taatctgaagcgaccttgtcctttctgggcagaagatggccactgttcaataaaagactgtcatgtggagccctgtcca

SEQ ID NO: 164 - DNA, 119 bp, Homo sapiens
  source 1..119: mol_type = genomic DNA
ggttgcatactgagcactactttagcaagcctggccaggaatggtctctctgcttaggtgtgatatgtgagagagacttgaatgcggcgaaagagtgagccgtcataagatctggagga

SEQ ID NO: 165 - DNA, 35 bp, Homo sapiens
  source 1..35: mol_type = genomic DNA
atgagaagtgctgtcccttccattcgtggtggcag

SEQ ID NO: 166 - DNA, 308 bp, Homo sapiens
  source 1..308: mol_type = genomic DNA
gcagcctcagtggaaacctcaggtaagcctgtggggaattcttaagatggaataacccttccgagttagtcgtccccatttggcacgagaggtataggcctttatatctctccatcagttggtcattggatgaaggccaccagaggaaataaggatccaatcttgggtaaggtggttcttttcacccaagcttgtctacctgcagcatttccacaactgaggtaattacatcccctttattcctgaagggtgatctgagtagtatgttacagtgtctaccacagtccactcgttgcaccatgtatttc

SEQ ID NO: 167 - DNA, 778 bp, Homo sapiens
  source 1..778: mol_type = genomic DNA
tcctacctaatgtgaaagagccatgagaaggtttggggaaagaacatgccagggaaaagatgtagaataccaagtaaatggtcttgagatagaaataagcttggtgtgttgaataggcagaaagctggtatagctggagtgaacgagagggagagttggaaatataggtaggcaccagatttaaaaaacagtaggaccgtattgaccatgtaaggatgctggattttattttaagcaggataagaaactactgaagggatttttgtgcaaaaaagactgtaagggtagaagacaagaaatagaggaaccatttaggagactcttgtgttagttcagataaaaacaatacagatttgcaatagaatgctgcagctgaaaaatgtagaaaatgatcaaattagggttgtacacaaaaggcaacaccagcaagcttttctgatgaattgagtgtgacgtatgatatagaaatgaaatcaaggatgatgcctaagttttgagtgcacatatacaagcacaaatgtacatatatgtaaaatcatgaccaaatagattttattccaagaatgcaaggatgattcttgcattgatgttgataatcatcaaaattcaatatgtgctcctgatttttaaaataataagaatgatgtatatttcttaacatgatgatttcagtcctaacatcagcatagctaacacgtcttgcatatggggaaacactagaggaattctcacttaggtcaggaaccaagacaaggatacccactatctgcattaactg

SEQ ID NO: 168 - DNA, 261 bp, Homo sapiens
  source 1..261: mol_type = genomic DNA
ggaaccactgggattttgtatcaaattaactattttcccatattttccaaactttatgtaagagttatatttctgtccaggtacggtcatatgacctgttggaccaaaagaaggaaggacaccttggttgacagtctcatttgcatgagtaaaagtggagtcattgtttcccaaagggaaattagggactgttacaaaagaaggaataatggaacttggataggcaaaagtgacaatgtggttcttggctactcaacaatc

SEQ ID NO: 169 - DNA, 399 bp, Homo sapiens
  source 1..399: mol_type = genomic DNA
ccgttcctgaagtactgcaataccaggtcgatgcgaggagtggatggagcaagctcctattccatctccctactccaaaaatccatgtaatatattgttctcgggtagaggacatatcaggtattaacagatacttcacttgatcttagccaaaaggccgagaagccattggagagacaggtgcttctttaaatttccaccactaaatctataaatctaagtgcatttgtagctgctttctcttgtttcttttctaccataacattgaactatatgaaatttttacttttatatttcaaaaatggttgaacatgccagtttcatattgctcaatgtaatacagtgggggaagtgtttcttgtatcaaaaaccatctcttcacaagtggtccagttcaca

SEQ ID NO: 170 - DNA, 111 bp, Homo sapiens
  source 1..111: mol_type = genomic DNA
gttctggatgattgcttgtgtgatattgacagcatcgataacttcaatacctacaaaatcttccccaaaataaaaaaattgcaagagagagactattttcgttattacaag

SEQ ID NO: 171 - DNA, 31 bp, Homo sapiens
  source 1..31: mol_type = genomic DNA
ctgagctgtgtctgccaagtggcatcgccag

SEQ ID NO: 172 - DNA, 233 bp, Homo sapiens
  source 1..233: mol_type = genomic DNA
ctgaccgtccagtgcgggaaacatctgcgaaccgcccgcagggtggggggacggcgacactccgggtaatggcagtcaaaagaggaagatggtgacggtccccctgagctgttttcgttttttcctctcggatgtgttaagcggctgggagtgtggcgggagatgggacgggcatgaaccacctcggctgtcttgcgaagggagcgagcgcccagagaaacggtgacgtcctt

SEQ ID NO: 173 - DNA, 102 bp, Homo sapiens
  source 1..102: mol_type = genomic DNA
atgagccaaggggtccgccgggcaggcgctgggcagggggtagcggccgcggtgcagctgctggtcaccctgagcttcctgcggagcgtcgtcgaggcgcag

SEQ ID NO: 174 - DNA, 169 bp, Homo sapiens
  source 1..169: mol_type = genomic DNA
tgtcaactctgtgttggagccagtagggagctctgtgggtcctcgagcaggaaaatcccatggcttaagcagtgtttcaggaagactgggatgttaggctccggagctctgagcaagtcagatgggactgggagtcataagaaggcttgactgtggctagtgataacca

SEQ ID NO: 175 - DNA, 124 bp, Homo sapiens
  source 1..124: mol_type = genomic DNA
gtgaggacctctgatggaccaggaaattggaattctgcctgggaggcaagcccatggaggccctgatctgcttggacagagagtagctcccttcacctgtaaaatgagagtgaacgagctggtg

SEQ ID NO: 176 - DNA, 96 bp, Homo sapiens
  source 1..96: mol_type = genomic DNA
tcacagcattcctgtaaaaggtatgaggttcgccctgattggaccagccgaggtcacatgcctacacatgagccaatcacagtggataaaggactg

SEQ ID NO: 177 - DNA, 37 bp, Homo sapiens
  source 1..37: mol_type = genomic DNA
aaattgacattccagacaagcggtgcctgagcccgtg

SEQ ID NO: 178 - DNA, 46 bp, Homo sapiens
  source 1..46: mol_type = genomic DNA
tgtgaagactggacttaaacagctacaccaccagaagccgagagag

SEQ ID NO: 179 - DNA, 130 bp, Homo sapiens
  source 1..130: mol_type = genomic DNA
agatgctaatccagcgtgcgtcctgacagaggttgaagggggcttctcaagtcccaggtccagcttggtgtggttcagctactcaagagacatctgctgctaatggatgagcagtcaacctggacgcagg

SEQ ID NO: 180 - DNA, 40 bp, Homo sapiens
  source 1..40: mol_type = genomic DNA
caaaaggaaggtgtcggcaagatcgtttttttctgagagc

SEQ ID NO: 181 - DNA, 35 bp, Homo sapiens
  source 1..35: mol_type = genomic DNA
tgaaacaggaagctctatgacacacttgatcgaat

SEQ ID NO: 182 - DNA, 65 bp, Homo sapiens
  source 1..65: mol_type = genomic DNA
cacctctacctgttgcccgccgatcacagccggaatgcagctgaaagattccctggggcctggtt

SEQ ID NO: 183 - DNA, 82 bp, Homo sapiens
  source 1..82: mol_type = genomic DNA
tattttggtcatgggctggtctggtcggtttcccatttgtctggccagtctctatgtgtcttaatcccttgtccttcattaa

SEQ ID NO: 184 - DNA, 70 bp, Homo sapiens
  source 1..70: mol_type = genomic DNA
aaaggctgcagtcaccagcatcttttccaaccttaatgaactgtatcctcaaaagaacactatcagactg

SEQ ID NO: 185 - DNA, 160 bp, Homo sapiens
  source 1..160: mol_type = genomic DNA
gctctgccgacttccagttctggaacaagatggttaaactcatttttccctgctctgctcctctaaatacaactaagtaccttggaaactattcagcagacaatgataaagggctctgaaagctagaagaaaaggtgtacttgcaagaaacctcaggact

SEQ ID NO: 186 - DNA, 32 bp, Homo sapiens
  source 1..32: mol_type = genomic DNA
gcttctgcagtttgccttggagtctgggctgt

SEQ ID NO: 187 - DNA, 91 bp, Homo sapiens
  source 1..91: mol_type = genomic DNA
taagaatgtagatgccggttgcaccttctgttgtcttggaagagactgcagtgcttggctggaaaataagctgctcgggactcctctgaga

SEQ ID NO: 188 - DNA, 384 bp, Homo sapiens
  source 1..384: mol_type = genomic DNA
cctacccatgaggaacaagcctgtggggggactgatattatcacttctgtcatcaagaaataaggccgcaggcatccctgaatatagagcatttattaatcgaactgtgaaaatgaaacacagacagtgatgacagctggaagttggccaatgtcctgttgtcatattgccctcagcctagggactggcctgtggctcactgaccctgtctcccactctccacctctcatcagcaactggacctggtgcacctggtctacctcatgtccagtgttttccgcagtacctgactggtatccccacccttggttgttgtgtggtgagctcgtccctatgttggcaagttacttaattcctaggtgtcccgccttcctcactgtaaaa

SEQ ID NO: 189 - DNA, 172 bp, Homo sapiens
  source 1..172: mol_type = genomic DNA
ccctggcatcatattgggacttgttaagggctgaattgtgtcccatcccaaattcgtatggtgccaccccaactccagtaccttggaatgtgaccgtatttggagaaagggtctctgaagaggtaattaaggtaaaatgaggtcatatgggtggcctctaattcaatatgac

SEQ ID NO: 190 - DNA, 133 bp, Homo sapiens
  source 1..133: mol_type = genomic DNA
ttgctgatatacttacaaactggtaaacaatgctctttaatcaacaattcataatctgggtcagcgatttttatctccatatttgctcatactgtatgacatcaatattttatattggcttgcccataactta

SEQ ID NO: 191 - DNA, 338 bp, Homo sapiens
  source 1..338: mol_type = genomic DNA
gccagttcgcctttcgctttctaaaatcatcttgctggagagaacggttatcaaatcccatccactgcccatgtaaaataaataccattcagaaaagcgtggcatggatggccatacttctgatgggtttataactgtagattgcatacgatcccaacgtgaagcctgaaatacgacattcaacgtcaggcttattccaggctactgctgtggctacttttgtaattcaaccagtggggcgttttaggctaacgtatattgcctctaagctgataagcattttcctgatcccaggccccttctaaaattgaacacacacgttcagctggggacaccta

SEQ ID NO: 192 - DNA, 25 bp, Homo sapiens
  source 1..25: mol_type = genomic DNA
tcagttttgtgcttacagtcccgca

SEQ ID NO: 193 - DNA, 220 bp, Homo sapiens
  source 1..220: mol_type = genomic DNA
tgggaggccaaggtgggcggatcatgagctcaggggttcaagaccagcctggccaacgtagtgaaaccccgtctctactaaaaacaaaaaaattagctgggcatggtggcgcacacctgtagtcccagctactcgggaggctgaggcaggagaattgcttgaacctgggaggcagaggttgcagtgagctgagatcgctccactgcactccggtttgggc

SEQ ID NO: 194 - DNA, 33 bp, Homo sapiens
  source 1..33: mol_type = genomic DNA
ctggggacactatggccccatcctagcctggtg

SEQ ID NO: 195 - DNA, 49 bp, Homo sapiens
  source 1..49: mol_type = genomic DNA
gaaaagatttttattcgtgtctacatcagtgtgaaaggcttcatcctgg

SEQ ID NO: 196 - DNA, 135 bp, Homo sapiens
  source 1..135: mol_type = genomic DNA
tggacttctctttagctggggtggtggctgctggagagggccctgcttgctcatctctgccagcttcccagtccctgcaaccagcagtggccagcctctggccacccccatgaaagcacataaaagggttgggga

SEQ ID NO: 197 - DNA, 69 bp, Homo sapiens
  source 1..69: mol_type = genomic DNA
gggaacaaaatgtctgctcaaaccatgacaaaattggccacaatttgccgattgggctgataacaaaag

SEQ ID NO: 198 - DNA, 80 bp, Homo sapiens
  source 1..80: mol_type = genomic DNA
aggtcgaggcactgtcctagcttgtgacctgctcccatacctattttctcagggtggaagcagacgctccaactcccaca

SEQ ID NO: 199 - DNA, 52 bp, Homo sapiens
  source 1..52: mol_type = genomic DNA
agacccaaagcctgtaggaagtatagcaggcctcacccaataccctgcagtt

SEQ ID NO: 200 - DNA, 25 bp, Homo sapiens
  source 1..25: mol_type = genomic DNA
cctcaagagaacatggagtcctttg

SEQ ID NO: 201 - DNA, 56 bp, Homo sapiens
  source 1..56: mol_type = genomic DNA
tcagtggcctccgagtaacccacctgctccagtctgcagatttccatctcactgac

SEQ ID NO: 202 - DNA, 56 bp, Homo sapiens
  source 1..56: mol_type = genomic DNA
caaaggcttctcttgctggctgagaattgttggggagctccctgcccacggagggc

SEQ ID NO: 203 - DNA, 45 bp, Homo sapiens
  source 1..45: mol_type = genomic DNA
gggttcctgtcggaatcttggagctcatcccccaaacttgagatt

SEQ ID NO: 204 - DNA, 148 bp, Homo sapiens
  source 1..148: mol_type = genomic DNA
aaatgcttagggagacagttcacagatatatatgtacttcacagggcacaatttaatccataaatcaatcatggatcactgctaaagaaaacaaaatatgctgccactaatttgccaccaccctgtgagcatgattggatgatgttta

SEQ ID NO: 205 - DNA, 116 bp, Homo sapiens
  source 1..116: mol_type = genomic DNA
aggcagccttttctgtcacaacacaacgctgagccggcagcctggctctgtcaggatctggggctccagcgcccgagaagcccagcctcgccggcggccaagttcaccgcgaggcc

SEQ ID NO: 206 - DNA, 46 bp, Homo sapiens
  source 1..46: mol_type = genomic DNA
ccgaggaggcggagcatggaactcgacagttaaaacatttaagaga

SEQ ID NO: 207 - DNA, 532 bp, Homo sapiens
  source 1..532: mol_type = genomic DNA
tggcagctccatctacacagtgtcgggctaggcatgggagcattctgggccaggagaaaggggattggatcctggatggtgggaaccgcaggtgtccccctccacgtgcctgggtccaagactgctctgctctggaccttctacgccttcagaggtacaagttgcagtgctacccttgctgaacctacaaccctgttcaagtgacaacttctctgagtctcatacgaggatattgaaagaaccttctgcacagggctgttgtgaggattaaccgtaataatacaagaatatctggcacttgcattcagcaactcaccgcttacttgttcaaccaggtaaaaaggttctgatcccagtgttgcaggacagaaagacctccccctctgtagctgcagatgtgacccagcacagaaaaaatggcaggtgaaagacaggcaggaagagcaactaagaaggtgggaggcacctccataagatgcctgaggccatggggatgaccgttcacagagctagtccctcgagcaatgtgtta

SEQ ID NO: 208 - DNA, 854 bp, Homo sapiens
  source 1..854: mol_type = genomic DNA
tgtggctccaagttccgtaggactcactagtctttttttccctagagggtcttgccattgagaggcaggtgatgtgctgtttcagaaaacaaaattgggacatgtcctgatatgacatccatcaaatatatacagataggtgtcacagcccccgaaaaagcttatctcttctaggccacacatagctatttcctccaactgtgtcagacattacaaagtttctagcaatcaaaacaagtcaaatgccattctcaggacccgttggaggattttttgctttgttttggctttgtacggtatccataccattttccaaattcttttgtccttacatattttgtttttcttaaaaaaaaaaaaatcacctataatcccatcaccagacaaaaccactagaaagaaaccaacattttagccatgtttttctgtatataaaaaaagtgtgtgtggaatttttcataacaatattgggaccatgacatctatcacattttttattaggaaatggccttcaacaatatgcatttaacaatatgcttgatgtctgtgtaatatttcatctaacaaatatatcatgatttatttaagtattccctgattgcttgcttctaactagaaaaaacaatttttctaagtgtcaccactgggttagagtaatctcagccaatcctcctaatagcactgtgagaccagagttatgataatcttcagttaatggacaagggacatgatggtgtggaaggataaataaactacccaaagacaactagctagtgagaccagcatggacagtcaagcccagtgcatgtaatctgtgctcccctgcactgttgctcatatacttggacccttgc

SEQ ID NO: 209 - DNA, 238 bp, Homo sapiens
  source 1..238: mol_type = genomic DNA
caacccagggtccttgcagagagattgatctgccagcagtggcatcagcagcaatagtagcagcagcaaagccctggacagtcctggcccccagtccacaacttagacacagcacatggcctaattcacccacagaagcagccactgtgaagccctgtgtctccccagactccatccagtggcataaggagacccaggccctgcagcttcctccccatcatggaaggctgtccatcta

SEQ ID NO: 210 - DNA, 168 bp, Homo sapiens
  source 1..168: mol_type = genomic DNA
acttaaaataggagtgaggtgagaggggcagctgggctcatggacgtcaagtggacagtttctcagctggtatttcctatatttcctgttttggacagcaggttcctgcccttctaagctgggggtaggggtgagggagtgtatgttaaaaagctctgtggacttgct

SEQ ID NO: 211 - DNA, 216 bp, Homo sapiens
  source 1..216: mol_type = genomic DNA
ggtattacctgatcccaacttggcaccaaaagacagccaacatagactcattcctcctgcttcctggtgagcctggtattctcctccacttccactgacagacatgtagggtgactgggtggtatcaacaataggaaccacatcataacaggcagcctagtttgggaagcactcttggtctccgtaggcctgagactccttttgcccatctagagg

SEQ ID NO: 212 - DNA, 374 bp, Homo sapiens
  source 1..374: mol_type = genomic DNA
agactgaccctacaataaatgcttaagagagtcctacatctggaagcaaaagggctatattcaccatcatgaaaaccctaaagtataaaactcattggtaaagcagacacacaaataagaaagagaatggaaccacatgttatcattacagaaaaccaccaaactgcaaagataaacaaaggaaagaaagaaagaaagaaaggaaggaagaaaggaaggaagaaaaaggattatttaaaattatcagaaaacaattgaaatgacaggaataagacctcacctatcaataacaacttttttaaatggcttaaatttcccagttaaaagatatagactggctgaatggattttaaaagtgacctaactctatgcta

SEQ ID NO: 213 - DNA, 54 bp, Homo sapiens
  source 1..54: mol_type = genomic DNA
agaagcttgttttgagctcattcaatatgcatcaggtggcggtaacatctggag

SEQ ID NO: 214 - DNA, 92 bp, Homo sapiens
  source 1..92: mol_type = genomic DNA
agggtgctggttctgagccaactttgcatggaaggcccagcagaccacgctcattacttacagccagcatcatcggggaactccggcacaga

SEQ ID NO: 215 - DNA, 106 bp, Homo sapiens
  source 1..106: mol_type = genomic DNA
gcggccctagtccactctcatgatgcctccattaatcccccggtcagggaccttccagccctgcccacagcagtcgatgccttcagtgcatctcagtcttccaccc

SEQ ID NO: 216 - DNA, 100 bp, Homo sapiens
  source 1..100: mol_type = genomic DNA
tcaggtcatccgctccatggaggtccccgttcctaccttggccttgcctttccccctgcatgtaaccttggtgaacttttcacaagagtctgcgcagtct

SEQ ID NO: 217 - DNA, 34 bp, Homo sapiens
  source 1..34: mol_type = genomic DNA
taagcagattaatgccgaggaaaagccttggtga

SEQ ID NO: 218 - DNA, 100 bp, Homo sapiens
  source 1..100: mol_type = genomic DNA
cccgtggagagagccccgctggtgaggaagcacggggaccctgctgcagggctggtggagggctccttctgcagacttctgagcttggagcacagatggg

SEQ ID NO: 219 - DNA, 32 bp, Homo sapiens
  source 1..32: mol_type = genomic DNA
ctggctcctgcactactatggccttttggctc

SEQ ID NO: 220 - DNA, 232 bp, Homo sapiens
  source 1..232: mol_type = genomic DNA
ttccaaggtctcacaagagtttgcctcctctcattgccatgtgaagacctctgtgggggaacaatgcatgggttcttggggtattataggggactacagagaagtgtcacctccacccaacagcctgattcagtctactcctcaggaggaacacaaagtggtctctctagtgccatgaaaccccaaaaagtgtcaaccagtattaaaggcctgcctgatatacaaccctcga

SEQ ID NO: 221 - DNA, 91 bp, Homo sapiens
  source 1..91: mol_type = genomic DNA
atgaagctaggcccccctgtcctgacagctttccaccccttccctgcccctctcaccctgctttccaggggcaatgcacctccccacttct

SEQ ID NO: 222 - DNA, 70 bp, Homo sapiens
  source 1..70: mol_type = genomic DNA
ccagacaccactggcctacatcaaactccaggccacagatggaaataggactgagatccctggacctggg

SEQ ID NO: 223 - DNA, 103 bp, Homo sapiens
  source 1..103: mol_type = genomic DNA
agatcaggtggattgaggatgtcactgccatcccctccaaaagcacctgcaggaagggggttgccatggtcaccatctgtgaacaggactcctcaaaatgttt

SEQ ID NO: 224 - DNA, 80 bp, Homo sapiens
  source 1..80: mol_type = genomic DNA
tcaaggtggccttgcgcttcaccgaggaggtgtcattaccaaacgtgctggacattggctacctacggaagaaagattaa

SEQ ID NO: 225 - DNA, 130 bp, Homo sapiens
  source 1..130: mol_type = genomic DNA
ccttcctacctggtagtagcactgacatcctcttcatccactggaagcttccagatcctggcccccacaacccattctctccccatagggcttccacagaaacacaacgtgtactgtgtgccaaatgact

SEQ ID NO: 226 - DNA, 106 bp, Homo sapiens
  source 1..106: mol_type = genomic DNA
ttatacatggcctcactgttggggaggcagtagggagtgttggagaccagggtcaggactagggctagggcaaggctaggaaggtgcccaggatgcatgttttaag

SEQ ID NO: 227 - DNA, 67 bp, Homo sapiens
  source 1..67: mol_type = genomic DNA
taagaaaaggatcgtggtggtagcaggaaataagacagaaattttccatgggggctccaggtctgaa

SEQ ID NO: 228 - DNA, 40 bp, Homo sapiens
  source 1..40: mol_type = genomic DNA
gtcttttcttgaacaggaacttgcatactcaaaaacaaca

SEQ ID NO: 229 - DNA, 117 bp, Homo sapiens
  source 1..117: mol_type = genomic DNA
gatcccgtggaaacacagcaccggaggatatgggataagagacaacagagaggagtggtgcttcctgaatttaggaaacatagctgctactttgggccctctagatacttgaaagaa

SEQ ID NO: 230 - DNA, 85 bp, Homo sapiens
  source 1..85: mol_type = genomic DNA
agggaagccaggttgttcatggacattcagtggaagaattaaggcaattaaatgttaagttttgcagggctggtcgacaagagaa

SEQ ID NO: 231 - DNA, 29 bp, Homo sapiens
  source 1..29: mol_type = genomic DNA
gtgtgtattctccattggtcacaatgcac

SEQ ID NO: 232 - DNA, 65 bp, Homo sapiens
  source 1..65: mol_type = genomic DNA
gacaagaataactccccactgggactggaggagaggaaggcacatgggggcccttggcagggtgg

SEQ ID NO: 233 - DNA, 125 bp, Homo sapiens
  source 1..125: mol_type = genomic DNA
tcagtcacgtctgcgccagagctttgatgacccacctgtcagccacactaagggccctgccatgaataaggcctccgtcactgaggatcctgtacccctctgccataaactcagtgacctgactg

SEQ ID NO: 234 - DNA, 205 bp, Homo sapiens
  source 1..205: mol_type = genomic DNA
gaactcccactgtataattgctaaacacaatgacagctataattgaggcactgaaggaaggtcaggggagcccaggagggcggggctgctgctgcctgctgagctgggagggttggtggcaccccttgccctgggttgccatagcagatatcataatcaattacggccgtctttcatgaggaacctggatctttcccaaggaatc

SEQ ID NO: 235 - DNA, 91 bp, Homo sapiens
  source 1..91: mol_type = genomic DNA
aggggcgggattctgccagccgcggctgccgctggagccggtgtccgggctggtgatggggttaattccctttcgtaagactcttacttgc

SEQ ID NO: 236 - DNA, 178 bp, Homo sapiens
  source 1..178: mol_type = genomic DNA
ctgcctccgcggctgctcttgcagccccagggactcgggagccagccacagcaggcctgccaagagcgtggtactgctctctcgtgtggctggcgccggtgccccgggctcccccggccgccccacggccgcatcccctggccttgcaccaagagaattttcagcttcgaccggttgg

SEQ ID NO: 237 - DNA, 122 bp, Homo sapiens
  source 1..122: mol_type = genomic DNA
cccgggatcagatttacacacgttttgattcctgagccttaggctgccaacaaatctttgtgggctttgaagttttttggtgttttgttttcttttgttgctgtgactaggtgcaaagggtg

SEQ ID NO: 238 - DNA, 192 bp, Homo sapiens
  source 1..192: mol_type = genomic DNA
ttgggttctgaggaaacatctgagttttgatcatttcttcagggtttgagaagactatggtggcttaatgatcttctgtattccataactagtacacctagttacagaattgacatagatacattcaggtcctggaggaaatttgtggtatctattaaaaaaatgaaaattgccagtcatgtagtagtcacc

SEQ ID NO: 239 - DNA, 360 bp, Homo sapiens
  source 1..360: mol_type = genomic DNA
tattatgcagaagatgtgcattgccatgccttgcaagtaatagggttttttttcttcttttttgaactggtactttaatatacctaattacatccatttgagttagtattaagttttaatttctcagaaataaagtagtgaaaattggtagcagttttgtttttcccattcttgagaatattacagtgataaacaaggcttgataggtttgtaaaatactattgctatttgaattaaaaaatttcactattgactttccatattctattgtaaataagttggggaattagtgtgtcaagggggtgtggtaacaaatggtaatgtaattttcaaattgctattgcagcaccaaaccacaga

SEQ ID NO: 240 - DNA, 499 bp, Homo sapiens
  source 1..499: mol_type = genomic DNA
tgagacgttagcatcaacatgactgtatatcatttccagaatttaattcaattagttattggctgagggatgaaatagagatgaaactaaatcctggcctcaaactagttttgtaccttattttccagcaatttggtttttttatatctagattttatctttactattttccctcatcttacccattcttagtctccatacacacctattaactttaatttccttttctgagaattttgaaagccctatagtttatgatcttttttccctctttgccttgtgaattttatatttgtgagttttttccaaatttctacctgtcagctcacttctttaggcaaggtgtaaggtttttgagcccccttatttcattttttatttttttaagagacagggattcaccctgtcacccagactggagtgcagcgacaggatcatagctcaccacagccttgaactctgaggctcaagggagcttcccatcttatgctcccaagta

SEQ ID NO: 241 - DNA, 338 bp, Homo sapiens
  source 1..338: mol_type = genomic DNA
gtgtgcagtggaccggtgaacatcaccacctgagctctgcctcctgtcagatcagcggtggcattagattctcataggattgcaaaccttactgtgaactgcgcatgcaagggatctgggttgcgtgcttcttatgagaatctaatgcctgatgatctgaggtagaacagtttcatcccataaccatcctcctcaccgcctgcaccatctggggaaaaattattttccaccaaacaggtccctggtgccaaaaaggttggggactgctgctcttaggacagaaagaaagaagttccataactagagtaaaatatcaccttacagtatgaggtagctta

SEQ ID NO: 242 - DNA, 242 bp, Homo sapiens
  source 1..242: mol_type = genomic DNA
gcaatcagaacacctacagcatttatcaactaagttcactgtcttatatgggtgtgatttgtggtcccctaaaacaattacagtggtaaagatcactgattgcagatcaccatcaccagacataataatgaaagagtttgaaatattgcaagaattaccaaactattacacagagacatgaagtgagcacatgttgggaaaatggtactgatcgatatgcttgactcaagagttgccacaaa

SEQ ID NO: 243 - DNA, 155 bp, Homo sapiens
  source 1..155: mol_type = genomic DNA
aagtgataggattgttgcccacccaggacgttatggattcactcagcattcattcatgaaatattcgttgataatttactatgtgccgtgtactgcctatataaagcagagagtacttgcccttatggattttattttctagtgagtgagacaaa

SEQ ID NO: 244 - DNA, 158 bp, Homo sapiens
  source 1..158: mol_type = genomic DNA
agaaactaaatcactgccttgtacaataaaaagctctatgttggggtgatcagacccaacaccaggtcatgggggcgatgagtccggtggagtcaaaggaatgagaaaaagacagtttgagagagaaagtgggaccggggagcctacgctatttattg

SEQ ID NO: 245 - DNA, 131 bp, Homo sapiens
  source 1..131: mol_type = genomic DNA
tgaaaattgggccttaagcacataaaaagttttaagttcatacagagaaataagctcacgcctgtaatcccaacactttgggaggccaaggtgggtggatcacctgaggtttctcaacctcgagaccagcc

SEQ ID NO: 246 - DNA, 152 bp, Homo sapiens
  source 1..152: mol_type = genomic DNA
gcacttctctgactatagttttttatatgactttgactctcagaaccctggtaattttttacgtagtctccagaaataacataaaataacttagatgttggcaagtgtggagaaaggagcccaaaatgtaatgcaagcactaacagatgaac

SEQ ID NO: 247 - DNA, 92 bp, Homo sapiens
  source 1..92: mol_type = genomic DNA
atgccttggtcgttttgtgtccctgggctgttggcagtgtgactctgctacagaataccacttggggagatcagcttactcagtacagggtg

SEQ ID NO: 248 - DNA, 195 bp, Homo sapiens
  source 1..195: mol_type = genomic DNA
cagatctttcttcacatcgtgcaggtaacgtatgagcattgtctgatggatccttacaacattcctgtatgcttttggaaagtatgatctttgtttaacaaaatgggaaacagaggcacatgctatacccagctatcacagaaaacaatagttagaatccagaaaacatactcatctggtttagtgtgttgccca

SEQ ID NO: 249 - DNA, 34 bp, Homo sapiens
  source 1..34: mol_type = genomic DNA
agcaggcactcccaatgccagactaatcagctgg

SEQ ID NO: 250 - DNA, 50 bp, Homo sapiens
  source 1..50: mol_type = genomic DNA
gagctctatagaggagcaatgcagagcatcagtttacaggtactatggaa

SEQ ID NO: 251 - DNA, 30 bp, Homo sapiens
  source 1..30: mol_type = genomic DNA
aatcttgccatacttgcacagctgaccaac

SEQ ID NO: 252 - DNA, 56 bp, Homo sapiens
  source 1..56: mol_type = genomic DNA
attcaactgctagagaatgtgaagtttcacattttaagccatcaaagaaccattgg

SEQ ID NO: 253 - DNA, 95 bp, Homo sapiens
  source 1..95: mol_type = genomic DNA
tgtgccaaaacagtcctgaatgttcgtgttggccttaatgaaccaccccttagtgactcagtcaccattctccacaagccctacagccatcccgg

SEQ ID NO: 254 - DNA, 277 bp, Homo sapiens
  source 1..277: mol_type = genomic DNA
cctcagctgcaaactatgtaatactgcttttatggggattaaatgaattaatacacttaaagcattgggagtagtgcttagtaaataataaataactctttaagggtttgctgttaatattaccagtttcacagcacatattgcaatcagttattatcttgtatattttgtctctgcactagaatgtaagcattttaggttctaggatcccatctgcttggttcactcatgtatccctattacctagaacagtgctctgtacatagtatccagtctg

SEQ ID NO: 255 - DNA, 33 bp, Homo sapiens
  source 1..33: mol_type = genomic DNA
gcgcccagcctaatactaagcttctaatcttaa

SEQ ID NO: 256 - DNA, 160 bp, Homo sapiens
  source 1..160: mol_type = genomic DNA
gtccattccagtccgggaatctacagtggtgacaaggacatgggactcctcctgccagattacagatggttcactacagttgacatcctggctgacaactgtgaaaaagaaccttggattattttattttatttttgtgggacaccacaatcccaaatcc

SEQ ID NO: 257 - DNA, 32 bp, Homo sapiens
  source 1..32: mol_type = genomic DNA
gcttcaagctccctgtagaattcgaaaataac

SEQ ID NO: 258 - DNA, 28 bp, Homo sapiens
  source 1..28: mol_type = genomic DNA
gatgtctgatactgttactgtaaaagat

SEQ ID NO: 259 - DNA, 107 bp, Homo sapiens
  source 1..107: mol_type = genomic DNA
aagtgaaagatacaaccagagttgaaaatcttatcaaatcagaaaactatgggaagattttggtagagaagaatgaacattgtattgagaacaatatagatttgcag

SEQ ID NO: 260 - DNA, 27 bp, Homo sapiens
  source 1..27: mol_type = genomic DNA
tcatacaaaactcacttctcaaaattc

SEQ ID NO: 261 - DNA, 138 bp, Homo sapiens
  source 1..138: mol_type = genomic DNA
tcagtcaggaaacgaagcaaggcttgggctgagtgaattttctattctacagggtatccaaagaggtcctttgttggcatttaacaggccggtggacttggtctggagcatcccggattgcttctcgcacctgtctgg

SEQ ID NO: 262 - DNA, 141 bp, Homo sapiens
  source 1..141: mol_type = genomic DNA
caacaaggtgggtccaaagtagtcagacttcttatgtggcagctcaggggtcccagagagaatgttccaagaaagccaagcaaagctgcaaggtttcttttgacataggcccagaagttccagaacgttacttcagctatc

SEQ ID NO: 263 - DNA, 31 bp, Homo sapiens
  source 1..31: mol_type = genomic DNA
catagcgactgtaacgatttggaaggaggga

SEQ ID NO: 264 - DNA, 38 bp, Homo sapiens
  source 1..38: mol_type = genomic DNA
caatgccacgcttcttcgacaatgaaggcagtacataa

SEQ ID NO: 265 - DNA, 207 bp, Homo sapiens
  source 1..207: mol_type = genomic DNA
aatcttagctatttcctgtttgtcaaacaaagattaaaagcatgtatgtggcaaagcgtggtggctcctgccagcactttgggatgccgaggcaggaggtttacctgagcccaggactttgagaccagcctggacaacacacgaagactttgtctctacaaaaataaaaataaaaaaattattcatgcgtcacggtacatacctgta

SEQ ID NO: 266 - DNA, 26 bp, Homo sapiens
  source 1..26: mol_type = genomic DNA
cggccattgcagtcatttggacagac

SEQ ID NO: 267 - DNA, 88 bp, Homo sapiens
  source 1..88: mol_type = genomic DNA
caagctcaaagttaaagctagttcggagccttgcagtgtgtgaagaatctccaccaccccctgcaccagagatatcacaggagaacca

SEQ ID NO: 268 - DNA, 148 bp, Homo sapiens
  source 1..148: mol_type = genomic DNA
tgagtgtaaggaagttgccagtgtctttggtaaacaagacagagagtgcaaaaagcaagtgtttgtcatcctagtaaaaactgccagtgtgcatcatttaccctatattatgaacacaaattttaactggtatgatgaattaagaaga

SEQ ID NO: 269 - DNA, 97 bp, Homo sapiens
  source 1..97: mol_type = genomic DNA
aattcagatccagttaacacaatcatttgagaaagaagagaagccctcaaaagatgaagcagaaaaagaaaaggccagtgataagttgcccagaaaa

SEQ ID NO: 270 - DNA, 56 bp, Homo sapiens
  source 1..56: mol_type = genomic DNA
attccagtcaagaatacactgattcaactggcatagatctacatgaatttttagta

SEQ ID NO: 271 - DNA, 299 bp, Homo sapiens
  source 1..299: mol_type = genomic DNA
cctctatagatgcaaacgtttttaagttatccacatagacattttttaactgtacggtttaatggtttttagtatattcaatatacagataggagcactatcaccacagttatagaactttttcattgccccaaaagaaaccccatacattgtagctattcctatgctaataataatagtaatactgatattggatgatcccaaccctaatctgttttctgtttctgtagatttccctgttctggacatctcatatgaatgaaattatataatgtatggtcgttcatgactggctttta

SEQ ID NO: 272 - DNA, 289 bp, Homo sapiens
  source 1..289: mol_type = genomic DNA
acagttttgtgagttcaggtcaggagatgaggctggagctggatgaagaccagctcatgcctgccttgtacatatgtttagttctaagaacagtaagaaacccatgacagatttaacaaagggagtgatgtgtgatcacatatgtgttcttaaaagattgttatgcatgtttcatgtagaatagattagggaagatcagggaagatacagggagacaatatactcctgctgtagtagtcaagccagaaatcctgttgcctggatccagggttgtggcagtagaaaaata

SEQ ID NO: 273 - DNA, 647 bp, Homo sapiens
  source 1..647: mol_type = genomic DNA
ctgatgtgtagactttcaggtgaccaaagcaggggctaccagttcttctattgaaattgagaataatctgcatagtgtttattttagggaatcattaacctcttggcctcgttttcttgatctgtaaactttggaagacaaaactgaatgatttgtaaagctgcttttagctttaagtttctgtaagttacattttttttttcacatgtatatgaaatttccaattagcacaggaaaattctagagccatgttatgggtgtgtgagcagggaggtcctttggggagtgataccattaatttgttgcagctaagagaactaaataagaccctagtgatctaaaggagcacatacaggtactccctagagtccttatttattttatatgttggaggtttttggttcacttagatttttatgggaaaatttaaaaatatataatggcagtttatagaatgggttgaaatatcctcttcttctaaattagcgatataattaatacttctctgccatagtcccatctacatactagtattagattcccatagaagtattcctgttgttactggcattgcatgttctttagaatactgtttctatggagttcagcatgataacaaagtcctgagcctaactaaagatgtctgt

SEQ ID NO: 274 - DNA, 46 bp, Homo sapiens
  source 1..46: mol_type = genomic DNA
atgctgctgaaattggaacaagaaattttagatttcattggtaata

SEQ ID NO: 275 - DNA, 67 bp, Homo sapiens
  source 1..67: mol_type = genomic DNA
gacatcttaccataggatgctattacacagagtagccgcttactttggattagaccacaatgttgat

SEQ ID NO: 276 - DNA, 33 bp, Homo sapiens
  source 1..33: mol_type = genomic DNA
tgggaagtctgtcatagtaaacaaaactagcaa

SEQ ID NO: 277 - DNA, 112 bp, Homo sapiens
  source 1..112: mol_type = genomic DNA
ctccagccttgaatcagtggtgttatggatgtcaacaacccagtgtccactggggtgtctcaatggagcgggaagttggcgattacagggcagtaaattcaggcatctataa

SEQ ID NO: 278 - DNA, 464 bp, Homo sapiens
  source 1..464: mol_type = genomic DNA
aaccttgtgtttgtcctctagatcacagtggaacttgcaacatttctgtggaagaaagatgagtccactataaaatgtattgctaagatttcataatcgttactttaggtcacaactttgacttctataaaagaacatctcttttctaacctgttccagttaatgttagcaaacctgtgccctactgtaatttaaaattaatggatgcactttgaagtagtctgtaagtttttagctaattgaatgacaaaatattttattactttcaggtataacaccaaactaggtaccataggagtagcataagatacggcactgcactttccttgtcccagcattttttcgtaggtttagacgaggcagtacaggctttgggtctaactgacctgagctccaactatggcttaatcatatgcctgcctttgaccttgcatatttgcttaagccatttgaacctcggtttg

SEQ ID NO: 279 - DNA, 56 bp, Homo sapiens
  source 1..56: mol_type = genomic DNA
aaggatgataaaggtgaagactttcagaaacgttatatcctcaagagagataactc

SEQ ID NO: 280 - DNA, 65 bp, Homo sapiens
  source 1..65: mol_type = genomic DNA
ctagaacaattgtaggatttgtataggtgcaagacatactataccagtagttcatttgcctaaaa

SEQ ID NO: 281 - DNA, 93 bp, Homo sapiens
  source 1..93: mol_type = genomic DNA
gagaatacgtttgaaagatgacagaagaagcaaatctatagaagaaagagaagaagagtaccagagagccagagaccgaatattttcccaaga

SEQ ID NO: 282 - DNA, 531 bp, Homo sapiens
  source 1..531: mol_type = genomic DNA
ttacgttgtagggtctcagtctcccttttatctattgatcacatttatttttaatcacatttgttgcacataaggtcatcttttagaaatattgagatcagttttgcttgtgttattaatagtttataaaatactacattgcagtagttatataaaattttacaaaagttggaagcaggtagactacaggagtcattaaaagaatgttctccagtctatatagtttgtgtgattttttttccccagacttgtgacagacttgagatttttattaatagaaattgctccactgtctacaaaatcatatactctagatgctacttgttagttgactttctttgacaaataatttatttcttcttttgaaataaagctaattgattttgtaggttaatatctgttttcttcttcataagtgattatataagataggctttctaaatggctaattattttatgcatatatgccagaagagaatcaatttgttttttgtcaacatctactaagcatctgtcctgtaatatgtgtta

SEQ ID NO: 283 - DNA, 33 bp, Homo sapiens
  source 1..33: mol_type = genomic DNA
cctgtgttcccaagagaattacattattgacaa

SEQ ID NO: 284 - DNA, 37 bp, Homo sapiens
  source 1..37: mol_type = genomic DNA
atgccagtagtacccagcagaggcgccagatatttag

SEQ ID NO: 285 - DNA, 117 bp, Homo sapiens
  source 1..117: mol_type = genomic DNA
tgaagtactcggaaccacgaccctggagcagcacagattcagacagctctcttcgaaacctgaaacctgctgtaaccaaagccagcagcttcagtggaatctcagtcctgacaagag

SEQ ID NO: 286 - DNA, 26 bp, Homo sapiens
  source 1..26: mol_type = genomic DNA
gcaaaagcataggcaggctttcaaaa

SEQ ID NO: 287 - DNA, 233 bp, Homo sapiens
  source 1..233: mol_type = genomic DNA
tccggagcacttaaggggtaatatgtttcttgacatgaggattcactctctgtcctggacacagatttacaaccatcaattaccataaaaattcttctctattgtgacataaacttaattaggtaggttcaatgaaacattatctcttgattgaatgcccataggtaattggaaattctttattacttattcgtagttggtagaaggcatggtttctcacctaggattattta

SEQ ID NO: 288 - DNA, 32 bp, Homo sapiens
  source 1..32: mol_type = genomic DNA
aatcagctgggcgtaatagcacgtgtctgtag

SEQ ID NO: 289 - DNA, 201 bp, Homo sapiens
  source 1..201: mol_type = genomic DNA
tagggtcatctacaggctctctttctcacatccagcagcctcttccaggtacagctctcagccagtcttctcatggcgcacctgtcgtctatccaactgtcagcactcatagttctctttcctttgatggtggcctaaatgggcaagtcgcatctcctagcactagcttctttttgcttcccttggaagcggcaggcatac

SEQ ID NO: 290 - DNA, 269 bp, Homo sapiens
  source 1..269: mol_type = genomic DNA
tgatctctggtttttgacaacagtattacaatacatttaacttttttaagatgacccttaaattacatttgaccgccttcacccaaatctgctccaccaattttttctccaaattatttagcagtcaacaaatacccaggacaacttgtttttagttatctataactgtcacacaaattatcagtatactaattgattaaaataattttactttagagtactttttctgcttgatagctatagactagtatagtcttctctcccaaata

SEQ ID NO: 291 - DNA, 71 bp, Homo sapiens
  source 1..71: mol_type = genomic DNA
atgggagtccagttgtgtataatcctcctatgactcaacaaccagttagatcccaagtgcctggacctcca

SEQ ID NO: 292 - DNA, 32 bp, Homo sapiens
  source 1..32: mol_type = genomic DNA
aacaaccagcagctaatcacattttctcacag

SEQ ID NO: 293 - DNA, 380 bp, Homo sapiens
  source 1..380: mol_type = genomic DNA
gttgacttgcctttacatatttgggactaaattcgctaattataattgagatagcctaagtatctcttagaactttaatattctgccactagtgatattccactcactactcataggaaaagagataacttcaaaggtttttcccctgataaatactgaaaatatgttggaaagaagggaattgttttaatcatatgagcctgtctggtgagtattttatccctatttcacaacagcaagaaatggacaacaggagaaataaaaacaaaactgtgattgttcattggcccaatgagcaaagtgagttgttttaagattccacagattaagcagttagaagaaactgagataggctgctcaggttctgcaaggtactcttc

SEQ ID NO: 294 - DNA, 28 bp, Homo sapiens
  source 1..28: mol_type = genomic DNA
gaagaagtatgatgataaacttgaactg

SEQ ID NO: 295 - DNA, 288 bp, Homo sapiens
  source 1..288: mol_type = genomic DNA
ttgtggtaaaagtgcaactcaaatcattattatctatctatgatgtcatagacaaacaatgtctatcttagttgacatagaagttctctatttaaattattgcctgaacaatcttaattccattagtttatctaacatttttaaagtattgtctctgaagacaacatgcagagatattgttcagaaggagatgcatgaatatacattttaactaagagttttcatcaagtgagattccctgggttcctcatctacttgcttatgtggctgtctacaagtcacttaatt

SEQ ID NO: 296 - DNA, 76 bp, Homo sapiens
  source 1..76: mol_type = genomic DNA
tctgcagtcctcttcacagcctgttcagtactctacagccccttacccatccccgttcctgccagtctcacccacc

SEQ ID NO: 297 - DNA, 102 bp, Homo sapiens
  source 1..102: mol_type = genomic DNA
gataacctagggtctcagtttagccacatgagtcttgctcgccagccatctgctgatggttctgaccctcatgccgccatgttccagtccactgtggttctt

SEQ ID NO: 298 - DNA, 90 bp, Homo sapiens
  source 1..90: mol_type = genomic DNA
gttatatcatgacagcagcccctccaccacatcctcctccaccgccaccaccaccacctcctcctcctcccctaccacctgggcagccag

SEQ ID NO: 299 - DNA, 31 bp, Homo sapiens
  source 1..31: mol_type = genomic DNA
cctactgctggatatcctgcctctggtcatc

SEQ ID NO: 300 - DNA, 226 bp, Homo sapiens
  source 1..226: mol_type = genomic DNA
atggttattagttgggttctgcctctttatacagtgattggagtgtcattagaccctttaaatttaatatatttttgacatggtatgccatgtcataccagattcaggtatgccacattgctatttttttatttgccctatctgtattttattctactttcctgcattttatattatttgaactttttttttttataatattgaatgctttacgaatttccgtgtc

SEQ ID NO: 301 - DNA, 215 bp, Homo sapiens
  source 1..215: mol_type = genomic DNA
tagccttaaggtaatataagccatattttaaataatttcatgcatgatgtaaagttttgactgtaacctgtcacatgaggtcaggtgtggagtttctttttgagtactgacatgacatgatgcttttggcatcatgttggtactcagaaagttaaagattttggagcatttcagattttggacatttggatttttaaaatactcgcccaggctca

SEQ ID NO: 302 - DNA, 25 bp, Homo sapiens
  source 1..25: mol_type = genomic DNA
atgccagcctgttattgcgctccag

SEQ ID NO: 303 - DNA, 74 bp, Homo sapiens
  source 1..74: mol_type = genomic DNA
gccactatcactccagccaacctcagtatcgcccagtcccttctgttcattacaattcacatctaaaccaacca

SEQ ID NO: 304 - DNA, 226 bp, Homo sapiens
  source 1..226: mol_type = genomic DNA
gtctctcaggatctcgaatatgttcatacatatgagtttgcaaaccaatgagattaaaagagtgagcaaatcttagcatcctctggaaaataccacagtgtcacgtctacatgctaaagggttgggagctgtactgggaatatcttaagcagtttgttaagtggctgccatctcttactgccattgagattgaaactgtctttgcagcctgataaatcacctatgg

SEQ ID NO: 305 - DNA, 72 bp, Homo sapiens
  source 1..72: mol_type = genomic DNA
aaacaattttgatctcagtgtataaaactatcttattgattttttaatgaactcatttctctgtatgcttct

SEQ ID NO: 306 - DNA, 25 bp, Homo sapiens
  source 1..25: mol_type = genomic DNA
tcagccttttataactctaggagtt

SEQ ID NO: 307 - DNA, 54 bp, Homo sapiens
  source 1..54: mol_type = genomic DNA
aagtttgtagcttcaccatatacatttaatattttgcaataattggccttgttc

SEQ ID NO: 308 - DNA, 55 bp, Homo sapiens
  source 1..55: mol_type = genomic DNA
agctgttggattcggggccgtagcactgtctgagaggtttacatttctcacagtg

SEQ ID NO: 309 - DNA, 229 bp, Homo sapiens
  source 1..229: mol_type = genomic DNA
agcatgacatcaaacggacctaatacacctaaatgcatttgaagctacttggtctcggttcttaccaacgatataatttaatttttttttccaaacgatgatgttgttgcatacctgtggaaagcaaaatgattctgtgaaactatacttttagttttgcaaccatttgataacttcaaagattatcaatgtattatatctttagtcttagctttccagataacccaga

SEQ ID NO: 310 - DNA, 298 bp, Homo sapiens
  source 1..298: mol_type = genomic DNA
taacctgccgccactgaaatctggagccaaatatatctggtaagtacccacagatttccttgagttgtatagactcttccatggaatagttctttaaatagctgtgagcaataaactctgtgtgactgtttttgttagaattggtttttgtatatgtatatgtttatttcaggcacaggagtgagagaagaggggatgagagatgagaagggataatcaagtgtgatggcaattgcatctccttccaaatacacccatggggctggctttagttgaacttgcccacctactaaaatag

SEQ ID NO: 311 - DNA, 530 bp, Homo sapiens
  source 1..530: mol_type = genomic DNA
tcgcccataaaacgtagcagctctccttgcacaaaatgtgtccaggttaaagctggcactgccctgctgagtaaagtctgacttcttggcaaagcagcctgactttgtggagaagacagccagtatctatgaaaactctgctagactaatcttgtatagactcatctggaatgtggcaacagactttttgagcaaaagcagcctccgaggcaaaacagcaaaactaaagcccaaagggaacattggagattcacttggaaatactcaggctgagagacagaactgtgggatgtggaacctgaaatagtgtcactatttgagccagttcttctccttcccaattgtcttttgttatgttttaatatttttagagatggagtctcactgttttgcctagactggagtgcagtggcccttcctaattgtttaatacaatttatgcgtataatctaattatagtaaggcaaggaagtgtaactttgaaatacatcagtagtaaaccacgcatcttgcgggtagtggacaaacca

SEQ ID NO: 312 - DNA, 86 bp, Homo sapiens
  source 1..86: mol_type = genomic DNA
gcctgagcgatagagactgcatctgaaaacaaacaaacaaaaagaataagataccattggaaatttactcatgcagctttcatgat

SEQ ID NO: 313 - DNA, 40 bp, Homo sapiens
  source 1..40: mol_type = genomic DNA
atgaattcagagcaggatttaactcattgtaccattacag

SEQ ID NO: 314 - DNA, 98 bp, Homo sapiens
  source 1..98: mol_type = genomic DNA
taccaaggaatagttggagttcagcaaccccagagtcagagcctagtcagtggccaacccaacagcattggaaatcagattcaaggagtggtcatccc

SEQ ID NO: 315 - DNA, 109 bp, Homo sapiens
  source 1..109: mol_type = genomic DNA
ccatcagacttatcaacagcctgttatgttccctaatcagtctaatcaaggatctatgcccacaacaggaatgcctgtttactatagtgtcattccacctggtcaacaa

SEQ ID NO: 316 - DNA, 208 bp, Homo sapiens
  source 1..208: mol_type = genomic DNA
agtctttggaattacccgcagcttggacccaaatgaggcagataaacttgaaataaggtagatgtaagctgacagtagtgattggtcaccatgtgacaaactagcattgatctgttccaagtatagagtaccaatgtgagaaattgaatgagttgtacgtgaagcagggaatgtgtattctgtcagactcatcttggtacattttgga

SEQ ID NO: 317 - DNA, 791 bp, Homo sapiens
  source 1..791: mol_type = genomic DNA
cagggtcttgatccatacagtcttactatgttttagatgctaaatggactctagtagccttcattttattacaagattataaggaataagattcctataagaacacaaagtgagtctttgttttgaaaaatgtcttacttagcttgggttgcttagcaaaattgttttcttacagaggttccttgtgtagaaaggtagaatttgaattattatgtctactttcagctcatcctttcagttcactgaggcaactttgtgtttggattggattgtgttgttacttatcattatgaagattgagcacagcctgatacaagtcaacatatactgtcactttaagcgagcaaagtactagtcagggacactaattttacaacaactcatgagatttttctcagtccttagtgtggagagaaaattagtttgataccagcagccttcaaaagtgggcaagtgagttggatatcttcaaaatgctctcatttttaccggttcttctcctattttccctttcattttcactatttttatcttgaaattcaaaacgataatacctttgtctttgatctatattctcaaaggggtagcatacagacaggaacttgaaaagactatagcctttttttaagaacctttaaaaaatgtttcacagaatctttatgaaattatgaaaaagaaaacctacttttaagtctttttcccttttttctgtccacagtctgtttttcctcatttttgtatcctagtatttctctagtgtcccttttgtcctacttgtgatacctctcttg

SEQ ID NO: 318 - DNA, 278 bp, Homo sapiens
  source 1..278: mol_type = genomic DNA
ttttgggtggcagataacattttacttaattggggttcaaagttagtgttctttgtcatcaagttgatttcagatgttcatctgtaaaaaccattcttagcttggaggcaatacagaagcaagcagtggtctgggttttgcctataggccatagtttgccaactcctgtactagatggttgatagccagcaaaaaaaaaagacaaagaggcagtggtcacaaatgaagaccaacaacttaggaaaaaggagtgtggaagccaacatacaaggagattt

SEQ ID NO: 319 - DNA, 186 bp, Homo sapiens
  source 1..186: mol_type = genomic DNA
tcagccgacttagaagcaatacaagccagaagacagtggagcaacatctttatttgaagaagtgaaagaaagaaaacttgcattctatacctgtaaaaatatttttcagaaacagagatttcaaacacacaaaagctgaattaattgccagccacctcgcactgtgagaactgttaaaggaagttt

SEQ ID NO: 320 - DNA, 1247 bp, Homo sapiens
  source 1..1247: mol_type = genomic DNA
aggcaactttggtgaggctttatggtgtgcatatacataaaactctttaaattatatactttatgtgtggtttattttctataaattatacctcagtaaaactataaaataatctgagtcttaaattttttcttagagactggttcttgctgtcatttaggctggaatgcagtggtgtgatcctgactcactgaggcctcaacctcctgggctcaagcaatcctcctgcgtcagcctcccaagtagctgggactacaggtgcacgccaccacacctggctaattttttaattttttttaaagataggatctcactgtattaccctgctggtgtcgaacttttgggctcaagcaatcctcccacctcagtctcccaaactgctgggtttacagatgtgagccaccttgcctagccttcttttctaatagtttaaacaaagactagttttggataaagtgaaaagaaatactgtaaaactaacaaattattaaaaacaagagtaagaatttgtgaggttaagataggccacagggcatttaatggaggaataaaggtagacttgaactaactgtaaaacctgttacagagtcatattgaaatgttaaaatttaatcaaaagtgtttttttcaaaaagcaaatgactaaaaactcctttcagccagaggtgagagatcggggggaaacaaaaaaacaataaaaagaaagtccaaatacctatgttgcaccagcctgaccaacatagtgaagccccacctttactaaaaatacaagaaattagctggaagtggtggcatactcctgtaatcccaacaaaatacatgtaaaacctttatgcccaaaaccatcttgtgatgtggaagatttgtactccctatggtttatatcttagaacagatgtcagaaaactacagcccacaatcaaagaatggtttttaaatttgtaaaggattattattttttaactcctaagtgaccatgtgttactcagagttaaaatatatactagctggctcttgcagaaaaagtttaccagcatctgccttaaaaaaaccttggcagataggtatcagagacatgtttatgaatgtttgtagcaacaatgtttagcctaatactggaagtaatccaaataaaatggaatagaatgtgtaagtatattttgatgtattcatttcagacactactatacaacaaagaaaattactaaagtacaactacttgtatccaattggttgagtctcacaga

SEQ ID NO: 321 - DNA, 25 bp, Homo sapiens
  source 1..25: mol_type = genomic DNA
gttggacaaagtgggtcacgcctgt

SEQ ID NO: 322 - DNA, 2373 bp, Homo sapiens
  source 1..2373: mol_type = genomic DNA
aggcagggatgcttctaagatactagcaatgttctgtttcccaatctgaatgaagttacatagataattattttgttattatacttaatttaaactgtaatatatttctaagcactctatattcgtctgttctcgcattgctataaagaaatgcctgagactgagtaatctataaagaaaagaggtttaattggctcacagctccgcaggctgcataggaagcatagtggcttctagggaggcctcgggaaacttcaattatggcagaaggcaagagggaagcaggcacgtcttacatggctggagcccgaggaagagaagagtggggggagcaccacacactttttaaagaaccagatctcatgagaactcactgtacagtaccaagggggaatggtgctaaaccattagaaaccacctccatgatccagtcacctcccagcaggccccacctccagcgttggggattacattgtgaatgagatttaggtggagacacacatccaaacaatattacactcagatagatagatagatagatagatagatagatagatagatagatagatagatagatagatagataagatagataagatagattgattagatagattagatagatagatagatagatagatagattagatattccaaaccccaaaaaatagcaaaatcattcgaagagaggcctaaatatatagaagactttaggagaaaaaaagctaacagaatgggaggagaggaattgaagacaataaatagagacagcctttgaagagaattgctttcataaggataagcgttgaattggattcgtatatggagaggatgaagtcaagacagaggatccttttttgattgaaagatagatgcatgtgtttgtatgctgaagggaaaggcttagtagatacagaagatttgcctctgcaagggacaagagagagagttgtaaggtccccagggagggtgagagccaccacaaaaatggaagcgggttagccttagataacagtgcagaggatttcatgggcagtaaacgaggacaaggagagtataaggatacagatatgggtagatggatagatatggcagcaagagaaattctcttctgattgctttgcttttctcagtgaattagtcaagatatcaagtacattatcagagtagaagaatgttctaaagttttgtaaatgtagaaatccattacagctatattaagactaatattcaaaggaaagaagcaagatacaggggaaatgtgacaagtatgcctaataaaagcttattatatagaacatttttatcacttctctatgttctaagatggtaacagtgagactacaagtaaataatccatagagataaattgttactcgaagaaaactgatagtaagttttcacatgggaaaatgttgtcttaccagcaatccaaaaaatgagaattaaggcaacttgaacacaaaaagtaggctaaaacatatagttagcaatactgtgcatagagacgtttaaacattactggttgctaggcatatcaagcccatttttctataaatcagtcgggatatttaacaaaatgcaaaattgctgtacttttaaattctacctctaaaattttatcacaaagataatccaccccagaatttaaattgtggctaaacaaattataacagtgctattattaacataagaatccaaataaaaagatgcaaaaaaaaaaacatggagtaacctggtaacctttgaatagtttaaattttcttctccatttatttttctgctaggctgattaagtttagcttaagtcatagtgagatttacttagttgtcacagaccgtttctcagatagtgggaccagtgagttttaaaggtgtttgttctgtgttaattgctccagtatcttcaattcagaagaataaatgtttgatattcaggctgctatagttcacaaatggattttattgatgacttacagcattttaagtgaatagagcacatgtctattaagtaatattattaagttcaggaagcttgcttaactgccattgacaataagatgtagggtggtttaaaaaggcagaaaaccaaatgacttaacacaccttgacaactgttcataaattttcaaagacatcgcttctagtagtcactaaaagctgtagtagatgtatgacttgcttttcaaatgaatcaattattgcttgagaagaatacacttgttcctattctcccatctaaaaaataatttgaaatagcagccatgaaatatttacaaaaacataaagagaaaagacacatgatggcagtttattttcatgtggaatttcccatgctattaattttcctaagtctcgaccttttgtgggtga

SEQ ID NO: 323 - DNA, 25 bp, Homo sapiens
  source 1..25: mol_type = genomic DNA
caggagcatcagagacatctttgtg

SEQ ID NO: 324 - DNA, 144 bp, Homo sapiens
  source 1..144: mol_type = genomic DNA
ggtatatataccctcaccacaaaaaatatatataaaatggaaattactatgactttgagaaagcttatgaggcagaaagttggtgttttcttccagagactacaagcctagttgagcatctgacctgcaaatgaattggttatt

SEQ ID NO: 325 - DNA, 99 bp, Homo sapiens
  source 1..99: mol_type = genomic DNA
tcttcagtaggttacctgcaacatccaggatcagaacaagtacaatttcctcgaaccacttcaccatgcagttcccagcagcttcaaggccaccaatgt

SEQ ID NO: 326 - DNA, 94 bp, Homo sapiens
  source 1..94: mol_type = genomic DNA
tgatgatgcagctcagtgtaccaaacaatccacaatcttgtgcccactcacccccgcagtggaaacaaaacaaatattactgtgatcaccagag

SEQ ID NO: 327 - DNA, 328 bp, Homo sapiens
  source 1..328: mol_type = genomic DNA
tgatacctgataccagtgggacattttacttgacaaattggccctgttacttgaatagatggcattttgaaataggagcttggtctgttatacattaaaagagactcaagaggtataatatcagatataatgtatggatcttatttggatattgaatgatcaaaagacattttttaaggccaggcgcagtggctcatgcctgtaatcccagcactttgggaagctaaggcagacctggaacgcaggagttcgagaccagcctgggtaacatggtgaaaccctgtctctataaaaaatacaaaaaattattcggccatggcagtgtgca

SEQ ID NO: 328 - DNA, 290 bp, Homo sapiens
  source 1..290: mol_type = genomic DNA
ggccatcttggctatgccagaaagtaaggaagggatggaagaaaaatagggacgtcttgaagaatacaggatcaggagtggaggtttggggcataaaacaatgatagaaatgaatgatcatccatagaataaaataagaattcatgagtccatactgataaaaatcaataaatggaaaatgaaactgtcttaccttagtgtaatataaagtgataaatgtagaatcgtgaaattaaaagatcaccaccaagaaaaccatcaggcaagagtcaccactagaggctacaaaa

SEQ ID NO: 329 - DNA, 124 bp, Homo sapiens
  source 1..124: mol_type = genomic DNA
agccctcaactcagtagccccattatttcaccagctcagtcgccagcaccagctcagctgtccaccctgaaaactgtacgtccctctggaccaccactttccatcatgccccaattttctagac

SEQ ID NO: 330 - DNA, 71 bp, Homo sapiens
  source 1..71: mol_type = genomic DNA
gagattccaggtatccattacttggccagccactgcagtacaatcctcctgctgttctgcacggacacatt

SEQ ID NO: 331 - DNA, 53 bp, Homo sapiens
  source 1..53: mol_type = genomic DNA
aagacaactaacctcctaggctttgttgcagaacatcatagctccctcagagt

SEQ ID NO: 332 - DNA, 85 bp, Homo sapiens
  source 1..85: mol_type = genomic DNA
tgaaggacaggaatgccactgccacaggcagaatccagaaggcctgggactgattttcttctgccagagtgcaaaacccaaacta

SEQ ID NO: 333 - DNA, 40 bp, Homo sapiens
  source 1..40: mol_type = genomic DNA
cattattaacgttgtttctcaactatttgtgggttttcag

SEQ ID NO: 334 - DNA, 30 bp, Homo sapiens
  source 1..30: mol_type = genomic DNA
gaaggagacaagctaaaaaagctgcatcca

SEQ ID NO: 335 - DNA, 196 bp, Homo sapiens
  source 1..196: mol_type = genomic DNA
gaaggtcttggaaattactgaactaccagatggaataactcgcatggaagctgaaaagctttttggggaactctttaaaattggcgccaagatccggtggctccgggacccccagtcccaaccacgtcgtcaccccctctgctgtggcagtggggacaacactgccaaccctgaacgctctaaacccagtgacttg

SEQ ID NO: 336 - DNA, 849 bp, Homo sapiens
  source 1..849: mol_type = genomic DNA
gactcctaggatgtgtgttcatggcattatagcttttgaagaaaggccagtgatccagcaaagggggaaaaatatgcatttcaccccacatgactaggaatccacatcagaatgatacagagttagcaggtttttctaaggaaatgccattcaaatgcctcctaacttttatagttattttgttttatatttctaaattcttgtatcagatccaaagctctattgtacagcaaattattcttcaaaatgattataaccagttgcaccctgtatttctttttgcagccagcacaatgtgacccaacttaaaatttgggggaaaaagaatgcaggagtgaaataaccaagtcaaaaccatgtactatctccttgggggttagggatgctaagaagagcccacaaatagaggattactcttcccctgaatctctaaactcagaaacaattaccaaaaaatacataactcttccttgtagggccctttccttattcatttaggtagtgtgaacattaagtataaaataaattatgttcttaatgcctcttaaaccacttacattcaaaggggaacagaaatcattctaagcaggaaaatacttccactttttttttttcaagtatctctctaataactaaatgccacttatttgcattctccttgtggattttttgtcacctaaggaaatgcatttgatgagtgctggaaacttcttaagtgctttacagtttgttttcattgtttgcagcggatcactggacatcaaagattcattgcacttatgaacaaggaaccttcttttcaatttctgtgtaatttgcaaggctgtacaatgtgtgctgatgcaagcc

SEQ ID NO: 337 - DNA, 25 bp, Homo sapiens
  source 1..25: mol_type = genomic DNA
tcagttcaagagaataaatgtttac

SEQ ID NO: 338 - DNA, 191 bp, Homo sapiens
  source 1..191: mol_type = genomic DNA
atcttcactgctgttcaacattataatggaggtattaaccaatatagttagatacatcgatttaaggcataagaatgggtaaagaagaaagactatctctgcagattatatgataacgggttgagcatccctaatctgaaaggctccaaaattcaaaactttttaagcagtcacacgatgcacaaagtaaa

SEQ ID NO: 339 - DNA, 27 bp, Homo sapiens
  source 1..27: mol_type = genomic DNA
aggtacagtagtttcttgttggaataa

SEQ ID NO: 340 - DNA, 28 bp, Homo sapiens
  source 1..28: mol_type = genomic DNA
ttgttgagaaaaggttaccctctgacac

SEQ ID NO: 341 - DNA, 80 bp, Homo sapiens
  source 1..80: mol_type = genomic DNA
gcctagacaacataatgagattccatctctataaaaaaattaaaaattagccaggtgtggtggtatacacctgtagcgct

SEQ ID NO: 342 - DNA, 368 bp, Homo sapiens
  source 1..368: mol_type = genomic DNA
tgactctccgggtcacgacgttaaccaaaaaataagacaaaaagagaatatattctatatgattctaattatatgaaatccagctgcagacaaactaatctgttatgttaaaaatcagatagtagtagagatggggtgtggaactgactgggaagggactggagggaactcttccagggatggaaatgttctttaagggggtgggggaacagggtatggttacacggacttttacagttgttagaattcatcagattcaacacttagaatgtttattttattgattgtattgtatgttaattatatctcaatttccttaaaaacttacacacacacatatgcatgagtcagcccacacatgtagaaga

SEQ ID NO: 343 - DNA, 85 bp, Homo sapiens
  source 1..85: mol_type = genomic DNA
acagtctggtatgaatgccgcaggaggaacacctagcccagcctattaggaggggtctttgtactgctgactataatcttatctc

SEQ ID NO: 344 - DNA, 147 bp, Homo sapiens
  source 1..147: mol_type = genomic DNA
aaggcaactggtctgatttttcaggtaagaacatatgagaggcaggctgagaccaattttctaccaggccagctaattcatcacaatgacaagctatgggtcatatgctttcaggaaccagacactggaacatgtcgtctgatgtac

SEQ ID NO: 345 - DNA, 42 bp, Homo sapiens
  source 1..42: mol_type = genomic DNA
gaatccaatggggagtaagagaaagtcccttttcaaggagct

SEQ ID NO: 346 - DNA, 361 bp, Homo sapiens
  source 1..361: mol_type = genomic DNA
catgtgttcggagacaaccagaagcagcaatgctcaaaaccacaaaactctggattgccgactctgcacatcctggttcctctagatacagttcagtggcacattcacaaataaacgttttcaaaaactgccctcaggcagttctagagaaatgctttgacttgcctaatggtataatgtcaagaaaggaagacgagcactgatcattcatactcattattacagtcacagggcactgtctgacttgacagatacagccgagcagttaaaaggttatgggaatttaagtccattatggtcatacgattcttatggacccagagatatgaaattaatcagccacatgtgtagggacaaagtt

SEQ ID NO: 347 - DNA, 43 bp, Homo sapiens
  source 1..43: mol_type = genomic DNA
cccgttttgccagcccaagactaggagccacggcacctgtcct

SEQ ID NO: 348 - DNA, 177 bp, Homo sapiens
  source 1..177: mol_type = genomic DNA
cgggcactcactggatggacagacagacgcctgctgtgccaggcctgccagacgctcccgccccggcactggtttcttcctggagctcgtggctggctagggggttctccatgtgctcatggccaggagagtctgccgagccagcccagccccattctactccgagtcgagtctgta

SEQ ID NO: 349 - DNA, 100 bp, Homo sapiens
  source 1..100: mol_type = genomic DNA
atgctgcggcgacgggcccaggaagaggacagcaccgtcctgatcgatgtgagcccccctgaggcagagaagaggggctcttacgggagcacagcccacg

SEQ ID NO: 350 - DNA, 57 bp, Homo sapiens
  source 1..57: mol_type = genomic DNA
ccaggtggacagcaagcggccgcctgcagagctgggagtcctgccaagccccggatc

SEQ ID NO: 351 - DNA, 98 bp, Homo sapiens
  source 1..98: mol_type = genomic DNA
ctgaagctagacaggcagcaggacagtgccgcccgggacagaacagacatgcacaggacctggcgggagacttttctggataatcttcgtgcggctgg

SEQ ID NO: 352 - DNA, 213 bp, Homo sapiens
  source 1..213: mol_type = genomic DNA
tgacccatgaccttgccgcatgaggcctgagggcatggtgtccagagtcccagagcagatcaggccccaaagtcctgctggaccccccagccaccgtgagctcctccgtgtggctagggagctgctgtccagaggcggaggtaaacattgatccctcctgcacactcagctctctcatggaagtcggagccctcagggtcacctgaaaactct

SEQ ID NO: 353 - DNA, 37 bp, Homo sapiens
  source 1..37: mol_type = genomic DNA
ttgccattcacctgtcccgtctccaacattaaagctt

SEQ ID NO: 354 - DNA, 124 bp, Homo sapiens
  source 1..124: mol_type = genomic DNA
tgtcgaggcccggttggctttcagaggcgtatccatgggagtaggtgtcatgtatcaaataggagattcaaagtcagctgttaccacggctacagaaatgccagtcttttcctaagagtgcgaa

SEQ ID NO: 355 - DNA, 87 bp, Homo sapiens
  source 1..87: mol_type = genomic DNA
aggacgggaacaccacagtgcactacgccctcctcagcgcctcctgggctgtgctctgctactacgccgaagacctgcgcctgaagc

SEQ ID NO: 356 - DNA, 119 bp, Homo sapiens
  source 1..119: mol_type = genomic DNA
agttacccaaccaggcctccaactggtcggccggcctgctggcatggctgggcatccccaacgtcctgctggaggttgtgccagacgtaccccccgagtactactcctgccggttcaga

SEQ ID NO: 357 - DNA, 39 bp, Homo sapiens
  source 1..39: mol_type = genomic DNA
cttcctcgggagtgacaaccaggacaccttcttcacaag

SEQ ID NO: 358 - DNA, 65 bp, Homo sapiens
  source 1..65: mol_type = genomic DNA
tatggccacgagaagaaaaacctgcttgggatccaccagctgctggcagagggtgtcctcagtgc

SEQ ID NO: 359 - DNA, 27 bp, Homo sapiens
  source 1..27: mol_type = genomic DNA
ttcaagacgcccccagagggcccgcag

SEQ ID NO: 360 - DNA, 128 bp, Homo sapiens
  source 1..128: mol_type = genomic DNA
gctccacgcctcaaccagcgccaagtccttttccagcactgggcgcgctggggcaagtggaacaagtaccagcccctggaccacgtgcgcaggtacttcggggagaaggtggccctctacttcgcctg

SEQ ID NO: 361 - DNA, 25 bp, Homo sapiens
  source 1..25: mol_type = genomic DNA
cttcctggtgttctcagacataccc

SEQ ID NO: 362 - DNA, 57 bp, Homo sapiens
  source 1..57: mol_type = genomic DNA
ggcagcaaggacagcttcgagatgtgcccactttgcctcgactgccctttctggctg

SEQ ID NO: 363 - DNA, 30 bp, Homo sapiens
  source 1..30: mol_type = genomic DNA
ccggctgttcgaccacggcggcaccgtgtt

SEQ ID NO: 364 - DNA, 66 bp, Homo sapiens
  source 1..66: mol_type = genomic DNA
ctgctggagtactggaagcggaagagcgccacgctggcctaccgctgggactgctctgactacgag

SEQ ID NO: 365 - DNA, 88 bp, Homo sapiens
  source 1..88: mol_type = genomic DNA
cgaaccccatcacgggtgaggacgagccctacttccctgagaggagccgcgcgcgccgcatgctggccggctctgtggtgatcgtggt

SEQ ID NO: 366 - DNA, 78 bp, Homo sapiens
  source 1..78: mol_type = genomic DNA
tgtgcctcgtgtctatcatcctgtaccgtgccatcatggccatcgtggtgtccaggtcgggcaacacccttctcgcag

SEQ ID NO: 367 - DNA, 80 bp, Homo sapiens
  source 1..80: mol_type = genomic DNA
catcgccagcctcacggggtctgtagtgaacctcgtcttcatcctcatcctctccaagatctatgtatccctggcccacg

SEQ ID NO: 368 - DNA, 51 bp, Homo sapiens
  source 1..51: mol_type = genomic DNA
gccagaacgtgactttctcactcactgacacacatggccctcatttctatt

SEQ ID NO: 369 - DNA, 96 bp, Homo sapiens
  source 1..96: mol_type = genomic DNA
aaatgcaccgcacccagaccaagttcgaggacgccttcaccctcaaggtgttcatcttccagttcgtcaacttctactcctcacccgtctacattg

SEQ ID NO: 370 - DNA, 42 bp, Homo sapiens
  source 1..42: mol_type = genomic DNA
ccaggcaactaccacaccttgtttggagtccgcaatgaggag

SEQ ID NO: 371 - DNA, 68 bp, Homo sapiens
  source 1..68: mol_type = genomic DNA
tcttccattcgagctttgatttgcagcaattcctcccaccaccggctatttccatcgcccagccaggg

SEQ ID NO: 372 - DNA, 89 bp, Homo sapiens
  source 1..89: mol_type = genomic DNA
tggaggctgcctgatcgagctggcacaggagctcctggtcatcatggtgggcaagcaggtcatcaacaacatgcaggaggtcctcatcc

SEQ ID NO: 373 - DNA, 72 bp, Homo sapiens
  source 1..72: mol_type = genomic DNA
tggtggcagaagttccggcttcgctccaagaagaggaaggcgggagcttctgcaggggctagccaggggccc

SEQ ID NO: 374 - DNA, 34 bp, Homo sapiens
  source 1..34: mol_type = genomic DNA
tgtgagggtctgtttgacgagtacctggaaatgg

SEQ ID NO: 375 - DNA, 96 bp, Homo sapiens
  source 1..96: mol_type = genomic DNA
gagcaggtttctgccccaacgcctgccctgagttagttcctgagctcaccgagccggagaaggcccgtgaccagccagaagcacggagcgcagggc

SEQ ID NO: 376 - DNA, 37 bp, Homo sapiens
  source 1..37: mol_type = genomic DNA
tgagggcggacggtggcggagagcccggccgtgaccc

SEQ ID NO: 377 - DNA, 203 bp, Homo sapiens
  source 1..203: mol_type = genomic DNA
ctgcagttcggcttcgtcaccatcttcgtggccgcctgtccgctcgcgccgctcttcgccctgctcaacaactgggtggagatccgcttggacgcgcgcaagttcgtctgcgagtaccggcgcccggtggccgagcgcgcccaggacatcggcatctggttccacatcctggcgggcctcacgcacctggcggtcatcagcaa

SEQ ID NO: 378 - DNA, 128 bp, Homo sapiens
  source 1..128: mol_type = genomic DNA
cttctcgtccgacttcctgccgcgcgcctactaccggtggacccgcgcccacgacctgcgcggcttcctcaacttcacgctggcgcgagccccgtcctccttcgccgccgcgcacaaccgcacgtgca

SEQ ID NO: 379 - DNA, 116 bp, Homo sapiens
  source 1..116: mol_type = genomic DNA
agagtatcctgtttgggaagaattcccatttcaggcaccctcgatgaagagccaggccaggaacatgggatgagagagcgaaatggtggaaaaaggggagataggctaattccaga

SEQ ID NO: 380 - DNA, 33 bp, Homo sapiens
  source 1..33: mol_type = genomic DNA
cctggctgcgcgcactgagtcctgtgtctgctg

SEQ ID NO: 381 - DNA, 50 bp, Homo sapiens
  source 1..50: mol_type = genomic DNA
gtatcgggctttccgggatgacgatggacattattcccagacctactgga

SEQ ID NO: 382 - DNA, 54 bp, Homo sapiens
  source 1..54: mol_type = genomic DNA
tcccatccatggcatgaggccccgaccctgtgctttgcctaattcgagcacgtg

SEQ ID NO: 383 - DNA, 122 bp, Homo sapiens
  source 1..122: mol_type = genomic DNA
ttggtcaaatcagagctcttctctgcacctgcgttttccctgcctggcctcatccctgggttgtggtgtggacattgtgggtgtctccacaggagccccagggccacgaaagctggggtggc

SEQ ID NO: 384 - DNA, 35 bp, Homo sapiens
  source 1..35: mol_type = genomic DNA
ctggccctgtgaaggccactctgggcgtttgggtg

SEQ ID NO: 385 - DNA, 112 bp, Homo sapiens
  source 1..112: mol_type = genomic DNA
atgtggttttctccgttggccgcctcctggacctcctggtgcctgacatcccagagtctgtggagatcaaagtgaagcgggagtactacctggctaagcaggcactggctga

SEQ ID NO: 386 - DNA, 88 bp, Homo sapiens
  source 1..88: mol_type = genomic DNA
tgaactgtacagcccagtctcggccctccccccagccctctccctatccttgtcagtggctgctctacctccggacactgagtcacat

SEQ ID NO: 387 - DNA, 28 bp, Homo sapiens
  source 1..28: mol_type = genomic DNA
acggaacaaaggatgagcagcccgaggg

SEQ ID NO: 388 - DNA, 93 bp, Homo sapiens
  source 1..93: mol_type = genomic DNA
cgtgcactccctgaggtcacagggccctgcccagccgcccactgtgcctcgtggccatggcctgctcctggccctagtctgacttgtccctgc

SEQ ID NO: 389 - DNA, 129 bp, Homo sapiens
  source 1..129: mol_type = genomic DNA
gctcccactggacacccttcacggttcccaaggccagccagctgcagcagtgacgcctggaaggacatctggtggtccttaggggagtggcccctcctgagccctgcgagcagcgtccttttcctcttc

SEQ ID NO: 390 - DNA, 100 bp, Homo sapiens
  source 1..100: mol_type = genomic DNA
tgtgtgaaccgctggctgctgttgtgcctcatctctgggcacattgcctgcttccccccagcgccggcttctctcctcagagcgcctgtcactccatccc

SEQ ID NO: 391 - DNA, 620 bp, Homo sapiens
  source 1..620: mol_type = genomic DNA
ttcgaatgtttcagagcgcagggccgttctccctcgtgtcctctggacccacccgccccttcctgccctgtttgcgcagggacatcacccacatgccccagctctcggaccctgcagctctgtgtcccaggccacagcaaaggtctgttgaacccctccctccattcccagttatctgggtcctctggattcttctgtttcttgaatcaggctctgctttccccctagccactacaggcagcctctgacagtgccgctttacttgcattctgcagcaattacatgtgtccttttgatccttgcccaacttccctccctctcccagctcctggcccctggcccagggcccctcttgctgtttttacctctgttccttggggcctagtacccagcaagcacccaaatgggggaggttttgggatgagaggaggaaacgtgtatacctgtaacatctggtggctcttcccccagaagtttgtgttcatacataattgttttccacgctggatcataatgtgacgtgcagttctgccctgtgctggggagccacatgaagcttcccctggctaacttgctaccccgcagcaatcccagtgtggccgtctgcttgctaaaaaatg

SEQ ID NO: 392 - DNA, 44 bp, Homo sapiens
  source 1..44: mol_type = genomic DNA
tcactactggaactgcacaaactggccactgacaaaaatgaccc

SEQ ID NO: 393 - DNA, 617 bp, Homo sapiens
  source 1..617: mol_type = genomic DNA
ggaagtccagccttaccaacttgtgaaccttgtctgaagggagccagggcctgccaatggaaccacctccaggagctgcaactgctgttgtcattaataccattgtgtctattttttgagagagataaacttttcatggtgttacattttggaaaaaaaaaaaaaagactaggtgaacagtcaggtaggaaagcagcataacagtcccttaaattctgatcatgtaggacattcttctttgccctgggcctgggaaaatgcagcatgttccagagcaaaagtcctaatgaggggaactaaaccagtgggacccaaaccaatgtcctggctcactgaggacccgttagaaccaaatctctgggtgtggacaggctcccatacttttcaaaaattcccctgatgactaatgaacaaccagaggtaagaaccagtggcccagaggaataaccagcccagctgttgtacgagctcgctaagctggctcaggtcaatgttgaattctctgctaggcagctcctcataagaactggcagagatggttcttacacaacaacaggtgacaactccagactctgccggaagttccaggatctgggttcccggacaatgcatgacac

SEQ ID NO: 394 - DNA, 62 bp, Homo sapiens
  source 1..62: mol_type = genomic DNA
ggttatctttcctccactcgagggattgaagctaggctgtcccacggcaccgggctcgtggc

SEQ ID NO: 395 - DNA, 99 bp, Homo sapiens
  source 1..99: mol_type = genomic DNA
caaagccacgcatgcagagaggttaccagtgtccatccagacgcccacttcacagacaggtagccaagcgccagagcccggctattgtagccctaagtg

SEQ ID NO: 396 - DNA, 144 bp, Homo sapiens
  source 1..144: mol_type = genomic DNA
acattctggatgaaagaaactactcaaaaagaatgtttactgtatgattccatttttatgtttaagaacaggtaaaattaacctgtgatgacagacatcagagtcatggttactcctgaggagaggggtttactagatgggaca

SEQ ID NO: 397 - DNA, 260 bp, Homo sapiens
  source 1..260: mol_type = genomic DNA
cctctcagatcacccaggaattctactcctaggtttttctcaaggagaagttaagtgcaaatatccatcaaaatgctcataaattttatttgtaatagctaaaaacaagacacaactcaaatacctattaaatgtttatctagacacaatccaaatgtaatacagtcatgctctgcacaatcatggtcccatgaaattataatggaaggaaaaattcctatcacccaagtgcacactgtttataaagtccacagcggtgt

SEQ ID NO: 398 - DNA, 101 bp, Homo sapiens
  source 1..101: mol_type = genomic DNA
gcacaaatggtattctgtatctgaaaattgtttggattaacttttgattcttgcctggttaaagaattacaattcttacctcagatcatgcttaaactatc

SEQ ID NO: 399 - DNA, 54 bp, Homo sapiens
  source 1..54: mol_type = genomic DNA
tctggaaatgtaactactataatggaccttacaaatgcacaaatggggccgggt

SEQ ID NO: 400 - DNA, 277 bp, Homo sapiens
  source 1..277: mol_type = genomic DNA
gcgagtgttctcattgcattcgtgaccccattgatcttgcaacagccccatgcatcagttattgccattataccattttaccgataaggaaactgtggcagggaggggtcaagcaccttgggtatttgacagcaaaaccaaggcttggtggtatcataaaacttccaagtagtaattcacaaaggtgactgggaaatggaagtgaccagaaatctttgcactatgaggacaagttcatgaccctgatacattcttgtccaggtagtatagctccaga

SEQ ID NO: 401 - DNA, 603 bp, Homo sapiens
  source 1..603: mol_type = genomic DNA
ctactgcatttctgtcactcgctgaaaaggacactctgtcagaaaatcttctagcaaacttcaaagggcaaaatcaccccttgttactgataaagcccagagagcttcagcagctaacattccctggacagggcacagcaaggatttgaacctaggtcagtctggccagaacacccacaagctttccttaactcagtgtgctatctccccacgactaggtcactactgctttataatcacctttgtagccaccagtggattttgctcatcagtatttttcaggcaattgatactttagatattcagctgcaagacgtatgcagttttcattgacatcttttggagaaactgacaaacctggacttgacttaatgcctttggaaccttccaagatgttatataactctagatagaaggctgggcctccatgatgtcaggaatgttgcattcttatttccccatagataaacccatttgtccacaaagtcaaggagtcaggcagaggcccttgccatggggctttttaggataaagcaacaagcctggactttgctctacaacagggttttgcatagggagtggtatgaccagatccctcaagaa

SEQ ID NO: 402 - DNA, 241 bp, Homo sapiens
  source 1..241: mol_type = genomic DNA
ggtgggatcactcagattctacagatattaaaaggataataaggaagtattgtaaacttttatgcctataaattttaaaacttagataaaatggataaattcctggcaaggcacaatctaccagagcccactcaaaaagaaagaaagaacccagacaatcctctatttacggaataaattgaatgtttagtttaaaatgtatgcatgaagaaaattcccggttgacatggcttcactagtg

SEQ ID NO: 403 - DNA, 209 bp, Homo sapiens
  source 1..209: mol_type = genomic DNA
caataatataaaggtcagaaggggagaaatggaagtatcctgttgtaagtttcttatgctatacgcgaactggtataatatcatttgaaggtaggctataataagttaaagatgtgttctgttaatcctaagaaatatgaaaataacacaataacaaagagttacagcaaataagacaacaaaagagataaagttggatcataaaaata

SEQ ID NO: 404 - DNA, 313 bp, Homo sapiens
  source 1..313: mol_type = genomic DNA
caaaggtttctgctcaagggtttctgctgcagtaatttgtgattctaagtattttcttgtcagtctttccaatttaaggggcagtaaacctcacttctctgatggatctaagagttgttaattaatcagtttgttcagccttttatttgttgttaggatgtagtgacaacttccaagctccttacgtactggattgcaaaccagaagtcaaactattccttagaaatgaaggggaagtaaagtcattttcagatgacaggatactaaaagaatatgtcaccagaagacttgcccttaaggaatgactaaagca

SEQ ID NO: 405 - DNA, 332 bp, Homo sapiens
  source 1..332: mol_type = genomic DNA
gccactgctttgctgagtcattctactatgcagcccctcagacacaaagcccggcggccacctgcccacagaggcacagagggccagccaactgcaagcacggaacttcaggatcttgcttttcgggttattttcactactgtaatttttttgtccttaggtaaaaaggataataattgtggaaaattatgtccttaggttaaaaagatcctggatcatgccagatattaaaatatggataaaattggcatgatcttggaatctgaacagaaaagaagctgcttttagctgttttcaactgtttttagcttttctgtctaaacagctgttta

SEQ ID NO: 406 - DNA, 38 bp, Homo sapiens
  source 1..38: mol_type = genomic DNA
cttagctgacattactttgatcatgaactttgttgcct

SEQ ID NO: 407 - DNA, 104 bp, Homo sapiens
  source 1..104: mol_type = genomic DNA
tcgctggggtatgaccattcccctggccttcctatcttcccatctatgcccaacatggctgccaaggggatctgtcctaaatgcaaagttagccatgcctgccc

SEQ ID NO: 408 - DNA, 52 bp, Homo sapiens
  source 1..52: mol_type = genomic DNA
ggggaggataaaatttggagcaagattctcaaggaagcaacaagatcctaag

SEQ ID NO: 409 - DNA, 37 bp, Homo sapiens
  source 1..37: mol_type = genomic DNA
tcttggacgagcctgaggatgtctacaagtggaagaa

SEQ ID NO: 410 - DNA, 34 bp, Homo sapiens
  source 1..34: mol_type = genomic DNA
tggaggaggatccaaggctcagaaagagaaggag

SEQ ID NO: 411 - DNA, 243 bp, Homo sapiens
  source 1..243: mol_type = genomic DNA
tgcctattgttctggatcattttgagaaaaaaaaagagataccttgaagaaagatgaagacaaaatatggaagggtgctgaatttacaaaaagcctaaggggaaaaaactcaaatgtccctcaggagtggaatgagtaaacaaatcatggcgtgttcacacaatggaatgctacctaccaataaaaaggaatgaactgcggatgcacacagaaacatgggtgaatccactaggcatcatgttg

SEQ ID NO: 412 - DNA, 723 bp, Homo sapiens
  source 1..723: mol_type = genomic DNA
cagccatttgcagagcattggagtaagttttaccttcatcccttagatgtgaatttgttatcctcactgtgacaatcccttatcacatggcttttagaaggattctcaaaaagctagactctcacattcaactttgcaattgcctggctgggtgttacgtttctttgcctcctattagagaccctatcagcatctaaaactagcgttgtttgaggatgttggagccaacggttctttgccagatagaactttgtgtgtccaaataaatggttcaaaatcatcaagcaaataaataccctggaataagagaagcctcatgaggatttgactccaaattgacttcctctgttctgcagtaagaagttaggaattaaaccaaaccttgcctgaggttcaggtatactcaaaagcaatgaggtgtggctcaggtgtgcgctggcaaggtcactgtgaagttcagccagaggctttgcaagcctgggcctgagaagccagacctcttagatccagaagggccaatggagctgggctggcctgctgccactcacaggcagagactctgccagcagaagggactctgctgtcagagctggagggcagcggaccacatggctgaggcccaaccacaggtctcctgactcaaaacctcttcccagggcttgtcctcctccctaaatatatgtgccccaaattgtcaccagatctcgggaaagcactggcttt

SEQ ID NO: 413 - DNA, 481 bp, Homo sapiens
  source 1..481: mol_type = genomic DNA
gaggtagacactattcccagctggatactctcaatgttgaggatatagatgcacaaaccaatgcagggaggcctccaggagccactggagaagaaatcttcagatcctaccaggcccatagctgttgcctttgtgggctcctgggttaatttccacacatcagtggcccaccttatgatatcctccctgcatgccacactcccggccatgctctgtggacagccattatttccagtaattgctaatgggagccagtctccaaagagtaatgaatcagaggtgttccttggaatgtgttacactaggacttcgccgatctcacaggctcctttccagatgagctgactgtaatctctgggaagctggatctggaggaacaatgggatgggatttgcggtgacccttcctgcccttcttgagcagcttgtgaaccagaagatgtgcctggagagaaagcctcatttggggaagtgcagtagtc

SEQ ID NO: 414 - DNA, 167 bp, Homo sapiens
  source 1..167: mol_type = genomic DNA
cagatctcagctgccgagtggaaaccccattctcacaccatagctatgggactgggggaaaggggaggaaataactaaagagtaaggaattgggggaggctttgaggtttggatgtgacaggtagtttgcatgtagttggaatgcagtaacattggtccacaaggtt

SEQ ID NO: 415 - DNA, 148 bp, Homo sapiens
  source 1..148: mol_type = genomic DNA
gagcacgtgatcacttctcacaactaatggagccaagattctgtccttatggctccagagacctcttttttttcccactgtaccacaacactcaccaggactggagtgccacctatgacctcattgcataatggatggcttgtcctca

SEQ ID NO: 416 - DNA, 116 bp, Homo sapiens
  source 1..116: mol_type = genomic DNA
ttaaagatctgtaggcttactagccatgacaatgatgacaataatgatgatgaaaatgacatcatcattaccaatagctactgccatctattgatcccataacatgtgatcatatc

SEQ ID NO: 417 - DNA, 479 bp, Homo sapiens
  source 1..479: mol_type = genomic DNA
agtcatgtagtttgagcactccagatttattttcctaattcaagattgttatagatacgctagattctttgcatgtctatataaattttagaatcaatttgtaaatttctacaacagattcctgctagcattattactgggattgcaataactctacagatcaatttgtggagaactgacatctcaacaacattgagtcttccaatctgcaaacatgatactgtgtgtgtgtgtgtgtgtgtgtgtgtgtgtgtgtgtgtgtgtcttctttaatttctttcaataattgtttagttttcaacatagagatcttgtccatcttttgttgtttattcatgagtattttatgctttttgaagatactgtaaataaaattgtttttctaatttcatttcccaaattcttgctgctgatatataaaagtataattgatattttaatattaaccttgtatcctgtgaccttgttcaattgatgta

SEQ ID NO: 418 - DNA, 294 bp, Homo sapiens
  source 1..294: mol_type = genomic DNA
gctcagtttgcttatccgttctcctgttgatgaacatctgatgtttgcagttctcctctccgtgagtcttcttgtaaacataattttcatttctcttgggaaaaaccctaggagtggtactgctgggtcaagggggtaggtgtttgtatagctttataagaagttaccacatccttactaatatttggtgatagctattctttaagttaaaagtgtagaggcatctcgttgtggttttaatttttatctcccaaatgagtaatgataagtgtctcttcatataccgaatggcta

SEQ ID NO: 419 - DNA, 351 bp, Homo sapiens
  source 1..351: mol_type = genomic DNA
cttgcaggccctgtgaacatatatacttcctggtgggaagagcaagggagcctctggtggaaagcagccccagggtccaagaaccacacagccctgcattagggcccccagggagggagaagaccaaggtcatgcttttgaacctggatgccagaagagaacagctgtggggaaaagcatgcctggaaccaagaaaaacatgtttaccaggggccattcctcacaccagctgcaggcagggtcaggaaagccacaggctgcactgtagttgcaaccttgcatgcggacgcaaggctcagaatgttcctcaaagatcctaaaatgttcccagagtcaggctgagtccattca

SEQ ID NO: 420 - DNA, 25 bp, Homo sapiens
  source 1..25: mol_type = genomic DNA
cactacaactggctgtcggtctccc

SEQ ID NO: 421 - DNA, 118 bp, Homo sapiens
  source 1..118: mol_type = genomic DNA
atgtgatggccaagggagcttcatcaatcatggcatctcaagggagctggagcagatgaggaggagatggaggtcccaggaagggctgtgatctgcctggggtcccacaatgggaaac

SEQ ID NO: 422 - DNA, 42 bp, Homo sapiens
  source 1..42: mol_type = genomic DNA
ctcacacaggcagttagccaaggcctgatatgcagaaagtgc

SEQ ID NO: 423 - DNA, 62 bp, Homo sapiens
  source 1..62: mol_type = genomic DNA
acccagggaggatagcacatgtcttcggctacactggtgaaggcatcgtgcctgctccacag

SEQ ID NO: 424 - DNA, 57 bp, Homo sapiens
  source 1..57: mol_type = genomic DNA
tgcagctgatacccaggatgtattattattactgtgacacagtgaatctaaaagagg

SEQ ID NO: 425 - DNA, 107 bp, Homo sapiens
  source 1..107: mol_type = genomic DNA
ctcaagggagattgtatgagactcctatagggtagaacctactctgaaagaactcacctcaattaagcttgattggagtaaaagccaaggctagacacctaagcttc

SEQ ID NO: 426 - DNA, 25 bp, Homo sapiens
  source 1..25: mol_type = genomic DNA
ctcagaaacctgtagatctctatga

SEQ ID NO: 427 - DNA, 25 bp, Homo sapiens
  source 1..25: mol_type = genomic DNA
ccctaatgactaattgttttgagca

SEQ ID NO: 428 - DNA, 279 bp, Homo sapiens
  source 1..279: mol_type = genomic DNA
tccctcataatgtctgctctgtgtcactatgtaccctcccctgtcctccattccccacaccaagagtattatgagtattaaatgccacgtgggcaggttccccaggcaatgagggggtgggcctgtcaaatgcaggccatgcagaatgccgcagggcgggagacgggtgagccaagggagccgagagttccagataacagagtgcacagcaaatgccatggcccgcgtccagcaaccaggagaaacagaactgctgagctcagaataggccaaggccgc

SEQ ID NO: 429 - DNA, 205 bp, Homo sapiens; identical to SEQ ID NO: 234
  source 1..205: mol_type = genomic DNA

SEQ ID NO: 430 - DNA, 122 bp, Homo sapiens
  source 1..122: mol_type = genomic DNA
ctgcaggctggaggcttagccacttctcaggaggagcctagaaaggatattggtcgcccagctgctgaacctgccccagcatccttgagggtcttgaaaatctattttatgctgggcacctg

SEQ ID NO: 431 - DNA, 126 bp, Homo sapiens
  source 1..126: mol_type = genomic DNA
atgcactatgtagcccatgagaaggagaccaactccgaggagctgagagtgagaggagactgcattctcagacacaattgtccagacacttcctttaaaaactacacgccaatgcccaataatgct

SEQ ID NO: 432 - DNA, 266 bp, Homo sapiens
  source 1..266: mol_type = genomic DNA
cgggacacatatgggaatacaattacagcaaagccggcaaggctcagtgaggggcagagggcctggccacatgaggagccagtgctgtgggcaggcccgggtctgagtgctggctgtgtgtcctgcacaaccacatctcccagagtgcattcgtcaccatccactccagatgccccttgaacaaatgaatttcacagttgcaaaaggctgaaaaatgctctgtgacctggcacccccttggggaaccacagtgcattaaaggctct

SEQ ID NO: 433 - DNA, 29 bp, Homo sapiens
  source 1..29: mol_type = genomic DNA
ttgtgattttcgttcctgaattcatagag

SEQ ID NO: 434 - DNA, 231 bp, Homo sapiens
  source 1..231: mol_type = genomic DNA
ggtgccctgcaatgttaagcaaaaaaaaaaaaaaaaaaaaaagactttggaaatagagttatggagccaggatgggtcttgagttagcctcactctttatttctttattcaaggaatggttgttcagggccagcggctcagccctgggagcactgactgcttcaagacacagactcctctgggatgccaggcagagtctgctcctgaaggcagactccactcttcatgggg

SEQ ID NO: 435 - DNA, 238 bp, Homo sapiens
  source 1..238: mol_type = genomic DNA
cctcacctttgcaggagactctcaatttctcagtccacatcagctctcagaccaccaaagcaagggttatttttctaaaagacatttgttcccattgctcctctgactaaagttcctactatgggacatttgcccttggcactcaaggaccttgcaatcaggctgagaacctcaggttctcaaactcaagaccatggggaatgtaataggtgaatcaggcaggtgaagtccaggactc

SEQ ID NO: 436 - DNA, 74 bp, Homo sapiens
  source 1..74: mol_type = genomic DNA
caggatgactcagaacccgcgtatgaatgctgtctattcatgggtccaggcttttgttaaagtctgggcctgca

SEQ ID NO: 437 - DNA, 115 bp, Homo sapiens
  source 1..115: mol_type = genomic DNA
tgttgagtgctagctgttgttgagtgcttgtcctgcctgggccctgtttttagcctttgatgtacatttctccatttaacttccacaatagccctattaggcagctagtattatt

SEQ ID NO: 438 - DNA, 25 bp, Homo sapiens
  source 1..25: mol_type = genomic DNA
cagggcttccttcaactcagggttc

SEQ ID NO: 439 - DNA, 100 bp, Homo sapiens
  source 1..100: mol_type = genomic DNA
cccgtggagagagccccgctggtgaggaagcacggggaccctgctgcagggctggtggagggctccttctgtagacttctgagcttggagcacagatggg

SEQ ID NO: 440 - DNA, 138 bp, Homo sapiens
  source 1..138: mol_type = genomic DNA
tcaggtcatccgctccatggaggtccccgttcctaccttggccttgcctttccccctgcatgtaaccttggtgaacttttcacaagagtctgcgcagtcttcttgtaagcagattaatgccgaggaaaagccttggtg

SEQ ID NO: 441 - DNA, 83 bp, Homo sapiens
  source 1..83: mol_type = genomic DNA
ttctctcccgacaggagcggccaggacagggagcagaaggtgactgctgtgctgcctggagctcttctgtccggaggtttagt

SEQ ID NO: 442 - DNA, 25 bp, Homo sapiens
  source 1..25: mol_type = genomic DNA
actccgtacagagagcgttccagcc

SEQ ID NO: 443 - DNA, 25 bp, Homo sapiens
  source 1..25: mol_type = genomic DNA
agaatcagttgtctcccaggcgggg

SEQ ID NO: 444 - DNA, 25 bp, Homo sapiens
  source 1..25: mol_type = genomic DNA
acaagggcggtgcatcaagaccaca

SEQ ID NO: 445 - DNA, 30 bp, Homo sapiens
  source 1..30: mol_type = genomic DNA
cggcccccagatatctgaggaaggctgagc

SEQ ID NO: 446 - DNA, 370 bp, Homo sapiens
  source 1..370: mol_type = genomic DNA
agactgaccctacaataaatgcttaagagagtcctacatctggaagcaaaagggctatattcaccatcatgaaaacccaaaagtataaaactcattggtaaagcagacacacaaataagaaagagaatggaaccacatgttatcattacagaaaaccaccaaactgcaaagataaacaaaggaaagaaagaaagaaaggaaggaagaaaggaaggaagaaaaaggattatttaaaattatcagaaaacaattaaaatgacaggaataagacctcacctatcaataacaacttttttaaatggcttaaatttcccagttaaaagatatagactggctgaatggattttaaaagtgacctaactctatgcta

SEQ ID NO: 447 - DNA, 216 bp, Homo sapiens; identical to SEQ ID NO: 211
  source 1..216: mol_type = genomic DNA

SEQ ID NO: 448 - DNA, 168 bp, Homo sapiens; identical to SEQ ID NO: 210
  source 1..168: mol_type = genomic DNA

SEQ ID NO: 449 - DNA, 491 bp, Homo sapiens
  source 1..491: mol_type = genomic DNA
gagcccttgttcagtgatcctatgacttgtcagctcagtgaattgctctgactcttactgctttcatttatgaaatggagacaataacccctctctcataggaagggtaagaccagaagagcctacactatggttggaataatatttgtatacagtgatcaagagaatgttctctgaaaccagactctctttaaatcttacctctatcacttattagttatatggctagctgttaaatgaggtcaaaagagtgtgttcttcataaaactatacagaagattaaattaattaaaacatgtacagtccttttaaaaaagatcaagtgaaacagcatacatgaaagtgctttcagcacgctgagaataacaatagcaatggctagagattatggagcactccccactgccagcaccaggggaactttgtacctacaactttttacttagtccacataaccatgaattcgtctcatttatgtagaccgggaaaca

SEQ ID NO: 450 - DNA, 238 bp, Homo sapiens; identical to SEQ ID NO: 209
  source 1..238: mol_type = genomic DNA

SEQ ID NO: 451 - DNA, 25 bp, Homo sapiens
  source 1..25: mol_type = genomic DNA
ttctttttgtctcccatatacgctg

SEQ ID NO: 452 - DNA, 160 bp, Homo sapiens; identical to SEQ ID NO: 185
  source 1..160: mol_type = genomic DNA

SEQ ID NO: 453 - DNA, 413 bp, Homo sapiens
  source 1..413: mol_type = genomic DNA
gacatagaatcaaccaaaatggccatcagtgatagactggataaagaaaatgtggtacatatacaccatggaatactatgcagccgtagaaagaaacgagatcatgtccgttgcagggacatggatggagctggaagccattatcctcagaaaactaacccaggaacagaaaagcaaacaccacatgttctcactcataagtgggagctgaagactgagaacacatggaaccagggagaggaacaacacacactgaggcctgccactgcaggtgggggttcaggggagggagagcatcaggaaaatagctaatgcatgtcaggcttaataagtaggtgattggctgataggtgcagcaaactgccatggcacacgtttacctatgtaacaaacctacaaatactacacatgta

SEQ ID NO: 454 - DNA, 620 bp, Homo sapiens
  source 1..620: mol_type = genomic DNA
tgtcttgctggcctgaaatcgagtacgcagcccggggtgatcagggtctcccggcccggatgtgtgagacttgcttcccctgggcaataggcgatacgatgctttaggaggaaggtgtctctccctcctaagccccggaggggagaacttccaaagacagaaaaccacaggcttcctggcacagagctttccctttatcagctaaagcagaatcttttctggccttaacctggccccttcctctaactgcaggcagagaggcagacagaaaagcacttgctgaaacacaaagttttgttctgtcctcaacgaactgtctagagctgattgctgatagtcgtggtgcattatgccttcctggttttcatttaattgggcaccacgctgcctttcaagacgccttaaaggaaccaacaaccaaatccaagagagctggacagaccattgaacacacagtaggctgtgtctcgtggctttcgttgtctggtgcctcaaagaaaacaccagaaagattgtttctaagctagagccaccccagattgcttaaagtgcaaagctcactgctgttgggggtacccttgtgagacactggaaagctggttttaccgtggccctatgaa

SEQ ID NO: 455 - DNA, 46 bp, Homo sapiens; identical to SEQ ID NO: 206
  source 1..46: mol_type = genomic DNA

SEQ ID NO: 456 - DNA, 116 bp, Homo sapiens
  source 1..116: mol_type = genomic DNA
aggcagccttttctgtcacaacacaacgctgagccggcagcctggctctgtcaggatctggggctcccgcgcccgagaagcccagcctcgccggcggccaagttcaccgcgaggcc

SEQ ID NO: 457 - DNA, 62 bp, Homo sapiens
  source 1..62: mol_type = genomic DNA
gactctgaaactacccggctctgcagaagcacgctgggcccaggggcttctagactgacagc

SEQ ID NO: 458 - DNA, 70 bp, Homo sapiens; identical to SEQ ID NO: 184
  source 1..70: mol_type = genomic DNA

SEQ ID NO: 459 - DNA, 32 bp, Homo sapiens
  source 1..32: mol_type = genomic DNA
gaaaattcctatcccaccagcaaatcagcccg

SEQ ID NO: 460 - DNA, 30 bp, Homo sapiens
  source 1..30: mol_type = genomic DNA
ctcccagataaagagatcaacacgggacag

SEQ ID NO: 461 - DNA, 45 bp, Homo sapiens; identical to SEQ ID NO: 203
  source 1..45: mol_type = genomic DNA

SEQ ID NO: 462 - DNA, 56 bp, Homo sapiens; identical to SEQ ID NO: 202
  source 1..56: mol_type = genomic DNA

SEQ ID NO: 463 - DNA, 30 bp, Homo sapiens
  source 1..30: mol_type = genomic DNA
aaactttaaggaagacaactgtgcattctc

SEQ ID NO: 464 - DNA, 75 bp, Homo sapiens
  source 1..75: mol_type = genomic DNA
tggaacatacgttcttgtgaacatagagagtggcattttcttatgtcgatgtaatgtgaacaactcctggtcacc

SEQ ID NO: 465 - DNA, 25 bp, Homo sapiens
  source 1..25: mol_type = genomic DNA
ttggtacatgccagcacggtctgtg

SEQ ID NO: 466 - DNA, 30 bp, Homo sapiens
  source 1..30: mol_type = genomic DNA
gattcactgtgcgaggacccacctgacacc

SEQ ID NO: 467 - DNA, 26 bp, Homo sapiens
  source 1..26: mol_type = genomic DNA
gtaaggtgaccaatggctggctgaag

SEQ ID NO: 468 - DNA, 25 bp, Homo sapiens
  source 1..25: mol_type = genomic DNA
tccgagctgtcacgtggtttataca

SEQ ID NO: 469 - DNA, 26 bp, Homo sapiens
  source 1..26: mol_type = genomic DNA
tcaggtttgctgggaggaatccagaa

SEQ ID NO: 470 - DNA, 131 bp, Homo sapiens
  source 1..131: mol_type = genomic DNA
ccactctaggcaggactttcatatcctttatctaactgtcacatgatggggtgacatgttgatccccccacagcctggatgatagaaatatttgtggtttgatatgcgtcagcgcttatgactttggcata

SEQ ID NO: 471 - DNA, 25 bp, Homo sapiens
  source 1..25: mol_type = genomic DNA
ggtcatatttcacgtctgccctgta

SEQ ID NO: 472 - DNA, 106 bp, Homo sapiens
  source 1..106: mol_type = genomic DNA
tgctttacaaacactgactcctcaacacacggtcatctctaaaagaaagggtgtttggcagttcctcgacagttctggaaaggctgccttactagaagcagagtca

SEQ ID NO: 473 - DNA, 82 bp, Homo sapiens
  source 1..82: mol_type = genomic DNA
tattttggtcatgggctggtctggtcggtttcccatttgtctggccagtctctgtgtgtcttaatcccttgtccttcattaa

SEQ ID NO: 474 - DNA, 65 bp, Homo sapiens; identical to SEQ ID NO: 182
  source 1..65: mol_type = genomic DNA

SEQ ID NO: 475 - DNA, 34 bp, Homo sapiens
  source 1..34: mol_type = genomic DNA
tgacagacactgaaaatcacgactcatccccctc

SEQ ID NO: 476 - DNA, 35 bp, Homo sapiens; identical to SEQ ID NO: 181
  source 1..35: mol_type = genomic DNA

SEQ ID NO: 477 - DNA, 340 bp, Homo sapiens
  source 1..340: mol_type = genomic DNA
agcggcagagcagttattaacagaatcacagtctttctggagctgctgtcagtcctgtgctgtcctcagggcctttgcttggtcaggggccccacttcttatccacccttccctctacctcaccgaggctgctaggcccaggtgtattgtgattatttgatgcacctgggaggccatgtctcccggggagtctcaggacctcattgggctggaattccacggggatctctcattgggtctctttgggcctttggagaggggagtgcagggcaccacctgggcgaacacctgtgccatcctgtaagtccttgtgtgactcttcatccaagtcaacaggggc

SEQ ID NO: 478 - DNA, 31 bp, Homo sapiens
  source 1..31: mol_type = genomic DNA
cgtggacccggctatgtctgactttgtgctg

SEQ ID NO: 479 - DNA, 69 bp, Homo sapiens; identical to SEQ ID NO: 197
  source 1..69: mol_type = genomic DNA

SEQ ID NO: 480 - DNA, 25 bp, Homo sapiens
  source 1..25: mol_type = genomic DNA
gtgtgtactaatcactcagacagtg

SEQ ID NO: 481 - DNA, 48 bp, Homo sapiens
  source 1..48: mol_type = genomic DNA
gaaaagatttttattcgtgtctacatcagtgtgaaaggcttcatcctg

SEQ ID NO: 482 - DNA, 33 bp, Homo sapiens; identical to SEQ ID NO: 194
  source 1..33: mol_type = genomic DNA

SEQ ID NO: 483 - DNA, 220 bp, Homo sapiens; identical to SEQ ID NO: 193
  source 1..220: mol_type = genomic DNA

SEQ ID NO: 484 - DNA, 133 bp, Homo sapiens; identical to SEQ ID NO: 190
  source 1..133: mol_type = genomic DNA

SEQ ID NO: 485 - DNA, 266 bp, Homo sapiens
  source 1..266: mol_type = genomic DNA
ctgtgccagtcaagcctggcctgtggctgtgacacctgcattaccccagatggttgcctgacctaggcctgtccttctatctgctttgtttttatgttgattactaggtgaagcacagtgttaaaaacgggaagaaaaggctaggaatgcagttatgggagtgtgaggctgggttggaataggtgggagaaagtccagggctgagtgtgtggaccctgctctagggatctgaccggctcaagctcccaggccattaaacaaagttg

SEQ ID NO: 486 - DNA, 284 bp, Homo sapiens
  source 1..284: mol_type = genomic DNA
ctgttgccatttgaacaagttgttaagaaaatctgccatgttttgctcttttttaaaaggaatgactttaataaccatagcaacacttactcagttttgtgatccactccaagattatgggagcaagaacagatactcctgaaagcaaccctcacctcctcccccgccccctgccctcagcaagtcctggcctgtgtgaactgaagggtttggaagctctggtttctaggagtgcccagaagctagaaagactagggtgtactagttattgaggggcagttgtc

SEQ ID NO: 487 - DNA, 29 bp, Homo sapiens
  source 1..29: mol_type = genomic DNA
aaaggcatttctgatttaattaagagttg

SEQ ID NO: 488 - DNA, 31 bp, Homo sapiens
  source 1..31: mol_type = genomic DNA
atgaaggaggagtcgtctacacttgtaaaaa

SEQ ID NO: 489 - DNA, 25 bp, Homo sapiens
  source 1..25: mol_type = genomic DNA
tccttgagttaaagaaatttgtgtc

SEQ ID NO: 490 - DNA, 674 bp, Homo sapiens
  source 1..674: mol_type = genomic DNA
taatccagtgctcaacatatttttgttgaataaaagcacaaagagattcatgagaagagggaaatgttgcatacttagggtaggagcaaaccacagaggtctttctcagcctgggcaaagaatgtcaactctgtgttggagccagtagggagctctgtgggtcctcgagcaggaaaatcccatggcttaagcagtgtttcaggaagactgggatgttaggctccagagctctgagcaagtcagatgggactgggagtcataagaaggcttgactgtggctagtgataaccaatgagcactggaaacatggaggggaatctttcctcccttttatatcagggttctctcctagaggagcaggtgaggacctctgatggaccaggaaattggaattctgcctgggaggcaagcccatggaggccctgatctgcttggacagagagtagctcccttcacctgtaaaatgagagtgaacgagctggtgtctaaggaattcagaatcccccccctggagttccacagggtatgtgggattttagggggaccagggtgtccccagtgcaagaaggaggctcccaccaaggggctgcagcactgcagataacccccaggggtatgaaaagaggctgaactgggggcctccacagtcagaatccatccattgacccaggatg

SEQ ID NO: 491 - DNA, 172 bp, Homo sapiens
  source 1..172: mol_type = genomic DNA
ccctggcatcatattgggacttgttaagggctgaattgtgtcccatcccaaatttgtatggtgccaccccaactccagtaccttggaatgtgaccgtatttggagaaagggtctctgaagaggtaattaaggtaaaatgaggtcatatgggtggcctctaattcaatatgac

SEQ ID NO: 492 - DNA, 25 bp, Homo sapiens
  source 1..25: mol_type = genomic DNA
tttccatttcctagtagggccagtc

SEQ ID NO: 493 - DNA, 48 bp, Homo sapiens
  source 1..48: mol_type = genomic DNA
tatgtgcattagtttgcttggactgctataacgaaatactacttggtg

SEQ ID NO: 494 - DNA, 79 bp, Homo sapiens
  source 1..79: mol_type = genomic DNA
gagcttttagagaatatgggccagaaacaggaaggagtcaggacctgataacgggaaccagcggacagtgaacgcagtg

SEQ ID NO: 495 - DNA, 71 bp, Homo sapiens
  source 1..71: mol_type = genomic DNA
gtgaatacaatattctccttttgttttcacttttcctaaaagttaaatcaaggttcaaaagaaaatcgagg

SEQ ID NO: 496 - DNA, 130 bp, Homo sapiens
  source 1..130: mol_type = genomic DNA
agatgctaatccagcgtgcgtcctggcagaggttgaagggggctcctcaagtcccaggtccagcttggtgtggttcagctactcgagagacatctgctgctaatggatgagcagtcaacctggacgcagg

SEQ ID NO: 497 - DNA, 46 bp, Homo sapiens; identical to SEQ ID NO: 178
  source 1..46: mol_type = genomic DNA

SEQ ID NO: 498 - DNA, 37 bp, Homo sapiens; identical to SEQ ID NO: 177
  source 1..37: mol_type = genomic DNA

SEQ ID NO: 499 - DNA, 65 bp, Homo sapiens
  source 1..65: mol_type = genomic DNA
cttagtcgtgtgtacatcattgggaatggagggaaataaatgactggatggtcgctgctttttaa

SEQ ID NO: 500 - DNA, 57 bp, Homo sapiens
  source 1..57: mol_type = genomic DNA
aatcccatggtcttcaatttggtcatttaaaaataatctacaaggtatactgttttt

SEQ ID NO: 501 - DNA, 1190 bp, Homo sapiens
  source 1..1190: mol_type = genomic DNA
caccactctatttaacagtgctggaaatattagccagcaaaacagataaagaaaaataaataaatggcatagactggaaagattcatagttggcacaattatgtatatataaaatcctcaggaatgtacactttacatactagaatttaaaagtaagtttagcaactgtgttagttcgttttcatgctgctgataaagacatacctgagactggacaatttacaaaagaaaggtttattggacctatagttccacatgtctggggaggcctcacaatcatggcggcaggcaaggaggggcaagtcacatcttatgtggatggcaacaggcaaagagagagcttgtgcagggaaactcctgtttttaaaaccaccagatctcatgacacccattcactgtcaggagaacagcatgggaaagacccacccccatgattcaattgtctcccacaaggcccctcccataccacatgggaattatgggagctacaagatgagatttgggtggggacacagagccaaaccacatcagcaacatgtcagaacacagaaaaaatgtaaaatatcactgtatttctatgtactagtagtgaactgtcagatgttaaaattcaattgcttagaatggcatcaaaaatatgaaatactggccaggcgttatggctcttgcctgtactcccattgctttggaaggctgaggcgggtggatacctttgaggccaggagttcaagaccatcctgagcaacagggcaaaaccttgtctctactaaaaatacaaaaaattagctgggcatggtggcctgtacctataatcccagctacttgggaggctgagacacaacaatcacttgaacctgggatgcagaggttgcagggagctgagattgaaccactgtactccagcctggggaacaaactgagactctgtctcaaaaaaaaagaaagaaatacttatgggtaaatctgacaaaataagtgtaagacctgtacactaaaaactacaaaacattgctgaaataaattaaagaagacctaaataatcggagagatatactttgtttaaaggtcagaagtctcagtattgctaaaatgagaactcttcccaatgcagtgctaatcaaatttctagcaggctttttgtagaaattgaaaagcagatttgaaattcatatggaagtgcgaacaaaacc

SEQ ID NO: 502 - DNA, 135 bp, Homo sapiens
  source 1..135: mol_type = genomic DNA
ccaccatgtgataccactacatgtattttagaattgctaaaattaagaagactgaccatatggggtgaggatatggaggaaatgaaattctcatacaatgctattggtaatgtaaaatcaaactaccactttgga

SEQ ID NO: 503 - DNA, 31 bp, Homo sapiens
  source 1..31: mol_type = genomic DNA
gcttgaaccaggaaactggatatcatcttaa

SEQ ID NO: 504 - DNA, 28 bp, Homo sapiens
  source 1..28: mol_type = genomic DNA
atgtttgggaacccaacaattaatgcag

SEQ ID NO: 505 - DNA, 1757 bp, Homo sapiens
  source 1..1757: mol_type = genomic DNA
cccgaatgtatctcccagatgtccagaatacgccatctgcaaaactgaactcatcctctttccccagaatgtatctcccggatgtcgagaatacgccatctgcaaaactgaactcgtcctctttcccccgaatgtatctcccagatgtccagaatacgccatctgcaaaactgaactcgtcctctttcccccgaatgtatcatctcccagatgtccagaatacgccatctgcaaaactgaactcatcctctttccccagaatgtatctcgcggatgtccagaatacgccatctgcaaaactgaactcgtcctctttcccccgaatgtatctcccggatgtccagaatacgccatctgcaaaactgaactcgtcctctttccccagaatgtatctcccggatgtccagaatacgccatctgcaaaactgaactcgtcctctttcccccgaatgtatctcccggatgtccagaatacaccatctgcaaaactgaactcgtcctctttcccccgaatgtatctcccggatgtccagaatacgccatctgcaaaactgaactcgtcctctttcccccgaatgtatctcccggatgtccagaatacgccatctgcaaaactgaactcgtcctctttcccccgaatgtatctcccggatgtccagaatacgccatctgcaaaactgaactcgtcctgtttcccccgaatgtatctcccggatgtccagaatacgccatctgcaaaactgaactcgtcctctttccccagaatgtatctcccggatgtccagaatactccatctgcaaaactgaactcatcctctttcccccgaatgtatctcccggatgtccagaatacgccatctgcaaaactgaactcgtcctctttcccccgaatgtatctcccggatgtacagaatacgccatctgcaaaactgaactcgtcctctttcccccgaatgtatctcccggatgtccagaatacgccatctgcaaaactgaactcgtcctctttccccagaatgtatctcccggatgtccagaatacgccatctgcaaaactgaactcgtcctctttcccccgaatgtatctcccggatgtccagaatacgccatctgcaaaactgaactcgtcctctttcccccgaatgtatctcccggatgtccagaatacgccatctgcaaaactgaactcgtcctgtttcccccgaatgtatctcccggatgtccagaatacgccatctgcaaaactgaactcgtcctctttccccagaatgtatctcccggatgtccagaatactccatctgcaaaactgaactcgtcctctttcccccgaatgtatctcccggatgtccagaatactccatctgcaaaactgaactcgtcctctttccccagaatgtatctcccggatgtccagaatacgccatctgcaaaactgaactcgtcctctttctcccgaatgtatctcccggatgtccagaatacgccatctgcaaaactgaactcgtcctctttcccccgaatgtatctcccggatgtccagaatacgccatctgcaaaactgaactcgtcctctttcccccgaatgtatctcccggatgtccagaatacgccatcggcaaaactgaactcgtcctctttccccagaatgtatctcccggatgtccagaatatgccatctgcaaaactgaactcgtcctctttcccccgaatgtatctcccggatgtccagaatacgccatcggcaaaactgaactcg

SEQ ID NO: 506 - DNA, 45 bp, Homo sapiens
  source 1..45: mol_type = genomic DNA
atgtccagaatacgccatctgcaaaactgaactcgtcctctttcc

SEQ ID NO: 507 - DNA, 456 bp, Homo sapiens
  source 1..456: mol_type = genomic DNA
aaagagattctcacttagagacatcataaggaaactactgaaaactaggaacaaaggaattatcttcaaagcagcaatgaaaaatgacattatttataaaattacaattatttaaagggttgtagatttctcatcagaaaccatagaggccaggccgggcgctgtggctcacgctgtaatcccagcactttgggaggccgaggtgggcagatcacttgaggtcaggagttcaggaccagcctgggcgaaacctgggcaaaaccctgtctcaactaaaaaataagaaacttagccagacgcagtggtgtgtgtctgtagtccccgctactcaggaggctgaggcaggagaatcgcttgaacctgggaggcagaggttgcagtgagccgagatcacaccactgcactccagcccgggcgacagagcatagaagccagaatgcaattgaacaacatttc

SEQ ID NO: 508 - DNA, 125 bp, Homo sapiens; identical to SEQ ID NO: 233
  source 1..125: mol_type = genomic DNA

SEQ ID NO: 509 - DNA, 31 bp, Homo sapiens
  source 1..31: mol_type = genomic DNA
cccacattcaaaaggcttgcccgagaggcct

SEQ ID NO: 510 - DNA, 80 bp, Homo sapiens; identical to SEQ ID NO: 224
  source 1..80: mol_type = genomic DNA

SEQ ID NO: 511 - DNA, 70 bp, Homo sapiens; identical to SEQ ID NO: 222
  source 1..70: mol_type = genomic DNA

SEQ ID NO: 512 - DNA, 91 bp, Homo sapiens; identical to SEQ ID NO: 221
  source 1..91: mol_type = genomic DNA

SEQ ID NO: 513 - DNA, 30 bp, Homo sapiens
  source 1..30: mol_type = genomic DNA
tgtatttggcatctaccatatctttgcatc

SEQ ID NO: 514 - DNA, 91 bp, Homo sapiens
  source 1..91: mol_type = genomic DNA
cacacataactctgggcgtaaagtgagtaaaaatatgagacttagaagaatatttcatcatggtatgctgattggggatttcacttactga

SEQ ID NO: 515 - DNA, 25 bp, Homo sapiens
  source 1..25: mol_type = genomic DNA
tcactacgattatctgaatctcata

SEQ ID NO: 516 - DNA, 32 bp, Homo sapiens
  source 1..32: mol_type = genomic DNA
tcacccttgacatccgcagaatccaccctcct

SEQ ID NO: 517 - DNA, 75 bp, Homo sapiens
  source 1..75: mol_type = genomic DNA
agtcctggggaactctcatctggaaaaaggcgctcatgacaggtggtgccaaccttccacggatgcttttcagca

SEQ ID NO: 518 - DNA, 25 bp, Homo sapiens
  source 1..25: mol_type = genomic DNA
ttcagcgccgaattgatgaggacac

SEQ ID NO: 519 - DNA, 48 bp, Homo sapiens
  source 1..48: mol_type = genomic DNA
atggagaaacaggcggcccagccaggccctttcactgcccgtgatgga

SEQ ID NO: 520 - DNA, 48 bp, Homo sapiens
  source 1..48: mol_type = genomic DNA
tccaccagactgatgacacttattccacttggttcccagaactaagag

SEQ ID NO: 521 - DNA, 92 bp, Homo sapiens
  source 1..92: mol_type = genomic DNA
gggcatttggactctaaccgggacaacctagtggccgggcaggggatgcaggcaccacaggtcacagtagtttgctacgagtgtcagctttt

SEQ ID NO: 522 - DNA, 64 bp, Homo sapiens
  source 1..64: mol_type = genomic DNA
cctgtgggaatccataaagaattgattctcatcccccagaagtgagatcccgcttgtgtcatca

SEQ ID NO: 523 - DNA, 34 bp, Homo sapiens
  source 1..34: mol_type = genomic DNA
ctggtgcacctggtctacctcatgtccagtgttt

SEQ ID NO: 524 - DNA, 122 bp, Homo sapiens
  source 1..122: mol_type = genomic DNA
tcctgcagttccaatgtgagcagcagttgtttccaaggctaacaatttcacgccaactagaagcctccacaagtcaggtgccaggcatttctaagccagtagagcagctccgcttgtttctc

SEQ ID NO: 525 - DNA, 49 bp, Homo sapiens
  source 1..49: mol_type = genomic DNA
cttggctggtggatctcgggttaaaatcgacttaggatgccccccttat

SEQ ID NO: 526 - DNA, 32 bp, Homo sapiens; identical to SEQ ID NO: 186
  source 1..32: mol_type = genomic DNA

SEQ ID NO: 527 - DNA, 32 bp, Homo sapiens
  source 1..32: mol_type = genomic DNA
tgaatttatattaccgagtggagggtcacatg

SEQ ID NO: 528 - DNA, 26 bp, Homo sapiens
  source 1..26: mol_type = genomic DNA
agtaaatccatttgctgattgcaata

SEQ ID NO: 529 - DNA, 68 bp, Homo sapiens
  source 1..68: mol_type = genomic DNA
ctcttgtgtaaaaatctaactcatctcgctgaatttcctgatttaaaagtctaattcatttcaccaaa

SEQ ID NO: 530 - DNA, 60 bp, Homo sapiens
  source 1..60: mol_type = genomic DNA
ccagacgtacagaggctgggagccattgtggtgtgctatattgatgacggcagcagtggg

SEQ ID NO: 531 - DNA, 75 bp, Homo sapiens
  source 1..75: mol_type = genomic DNA
ttgtgtatctgcgttcctttcaacaagtgtgacttcctcaatggcatcattcgtgagcgtaacacagagctcagc

SEQ ID NO: 532 - DNA, 35 bp, Homo sapiens
  source 1..35: mol_type = genomic DNA
gagctgaaatcgaccagggggttcttatccaacag

SEQ ID NO: 533 - DNA, 73 bp, Homo sapiens
  source 1..73: mol_type = genomic DNA
gcctacctaaaatattgaatgctgttaataaatctcctgaggccagcataagaaggtgatgggcaaaactaat

SEQ ID NO: 534 - DNA, 27 bp, Homo sapiens
  source 1..27: mol_type = genomic DNA
cttagagggccccacagttgtttgctg

SEQ ID NO: 535 - DNA, 254 bp, Homo sapiens
  source 1..254: mol_type = genomic DNA
tggttacaatggtactttcagcctgtccgaattatgtattgcccctcccctttttattaataacattgaagtgtgatgggacaaccactgaagccgtcagttgaaacctgctgggactttttagccattctcttcaacataaagaatgggtgtttttggagggggtgagaggaatggggaaatgttgtcaaagagtacaatgttttagttgagacaggaagaatatattttgttgagatctacagcacagcatg

SEQ ID NO: 536 - DNA, 25 bp, Homo sapiens
  source 1..25: mol_type = genomic DNA
tgtgctaggtttctttgcatgtacc

SEQ ID NO: 537 - DNA, 28 bp, Homo sapiens
  source 1..28: mol_type = genomic DNA
agcctcctccaaaacagcacactttccg

SEQ ID NO: 538 - DNA, 109 bp, Homo sapiens
  source 1..109: mol_type = genomic DNA
tttctcccgcccaccttctccgctgccagaccgcccgagctgccctcagtttctccccaagttggactcactttcggggtgtcccacaagcccgatcccagagcctgct

SEQ ID NO: 539 - DNA, 121 bp, Homo sapiens
  source 1..121: mol_type = genomic DNA
cgacctcgacggccgtcctgccgaagtacctgccgtcgctgcccacccccgtggtgcggccctgacggtcgcgcaggtcgacggacgacagcgcgctccggatgaagttgggcgggtagct

SEQ ID NO: 540 - DNA, 57 bp, Homo sapiens
  source 1..57: mol_type = genomic DNA
agactgtgatgactgggagagcgggctgaatgcgatggagtgtgcattacatttgga

SEQ ID NO: 541 - DNA, 33 bp, Homo sapiens
  source 1..33: mol_type = genomic DNA
catagtactctgaacatgcccgatttcatctgt

SEQ ID NO: 542 - DNA, 37 bp, Homo sapiens
  source 1..37: mol_type = genomic DNA
tgacaaaaatgacccccatttgtgtgacttcattgag

SEQ ID NO: 543 - DNA, 150 bp, Homo sapiens
  source 1..150: mol_type = genomic DNA
atgaaacagacagacttaatgaacaagccagtgaggagattttgaaagtagaacagaaatataacaaactccgccaaccattttttcagaagaggtcagaattgatcgccaaaatcccaaatttttgggtaacaacatttgtcagccatc

SEQ ID NO: 544 - DNA, 29 bp, Homo sapiens
  source 1..29: mol_type = genomic DNA
tttgacgaaacgttcaagtcaaacacaga

SEQ ID NO: 545 - DNA, 38 bp, Homo sapiens
  source 1..38: mol_type = genomic DNA
gaggtcatcaaagatgatatctggccaaacccattaca

SEQ ID NO: 546 - DNA, 35 bp, Homo sapiens
  source 1..35: mol_type = genomic DNA
gcgtacaaggcccacgaaatagtcggccgccgcag

SEQ ID NO: 547 - DNA, 90 bp, Homo sapiens
  source 1..90: mol_type = genomic DNA
ataagtccaccgcacagaactcgcgcgcctcccctcgaacgaacgcgcacgcgcgcgcagggggcgggtcttcttcccgacacccactga

SEQ ID NO: 548 - DNA, 90 bp, Homo sapiens
  source 1..90: mol_type = genomic DNA
ctccgcctccgcgacgggccgtcgggaggaggcgaccggaagccacttaaagcagagatcgaggtgacaggcgagctggctggactcgga

SEQ ID NO: 549 - DNA, 41 bp, Homo sapiens
  source 1..41: mol_type = genomic DNA
cgcggtcgaggctttctgcgttcgcggcggcggaatggccc

SEQ ID NO: 550 - DNA, 93 bp, Homo sapiens
  source 1..93: mol_type = genomic DNA
tctgtggtccctagacgtcggctcccgccctcggcgctgatctccggcgcgggcactgctttccactcggctcctgtcgtccgttctctcagg

SEQ ID NO: 551 - DNA, 61 bp, Homo sapiens
  source 1..61: mol_type = genomic DNA
gggcgcgtctatgcggcctcccccgcgggccgaccccgggtgctctgaggcgcctaggagc

SEQ ID NO: 552 - DNA, 50 bp, Homo sapiens
  source 1..50: mol_type = genomic DNA
ggcacggcagctacgggagccttccggctaccccgcgtttcgggctgcag

SEQ ID NO: 553 - DNA, 127 bp, Homo sapiens
  source 1..127: mol_type = genomic DNA
cattaactttgagagcgcacaagtcttcgtcttcctccccgccgccgcgggaagcgctcgccgcctttcccccgcgcttcgcggctcagttctgcgagcccccaagacccgttggacgctcctcggg

SEQ ID NO: 554 - DNA, 157 bp, Homo sapiens
  source 1..157: mol_type = genomic DNA
ctcagctgcactgcgcggagttggcgcggcccgggaccaggagctgagcaaaccgccgcggccaacaggaggcgtcactcggacccgggctcggcgccggggtgtcgcgcggcggcgggcgggcaggctttggagcggcagttttttcggaaagtgc

SEQ ID NO: 555 - DNA, 28 bp, Homo sapiens
  source 1..28: mol_type = genomic DNA
atgatcatcttccttcctttcctcgtag

SEQ ID NO: 556 - DNA, 41 bp, Homo sapiens
  source 1..41: mol_type = genomic DNA
gatttttagactctgaggagcagttggagctaatccacatt

SEQ ID NO: 557 - DNA, 217 bp, Homo sapiens
  source 1..217: mol_type = genomic DNA
cagactgtgtagtgcagcctccctctcctcctgatgacttttcatgccaaatgagactctctgagaagatcactccattgaagacttgttttaagaaaaaggatcagaaaagattgggaactggaaccctgaggtctttgaggccaatattaaacactcttctagaatctggctcacttgatggggtttttagatctaggaaccagagtacagatga

SEQ ID NO: 558 - DNA, 179 bp, Homo sapiens
  source 1..179: mol_type = genomic DNA
ggggaccagataccggaagcccatccttccactgaagctccagaacgagtggttccaatccaagatcacagctttccatcagaaaccctcagtgggacggtggcagattccacaccagctcacttccagactgatcttttgcacccagtttcaagtgatgttcctactagtcctgactg

SEQ ID NO: 559 - DNA, 28 bp, Homo sapiens
  source 1..28: mol_type = genomic DNA
gtatttataacaacttgtagaactgttg

SEQ ID NO: 560 - DNA, 70 bp, Homo sapiens
  source 1..70: mol_type = genomic DNA
aaaactttgcagaacagcggctcccacttcaccttcatgaagcaaatttccagtctgctgagtacttcag

SEQ ID NO: 561 - DNA, 32 bp, Homo sapiens
  source 1..32: mol_type = genomic DNA
aagttgacttgtggtcattgcaacctggtttt

SEQ ID NO: 562 - DNA, 154 bp, Homo sapiens
  source 1..154: mol_type = genomic DNA
ataacggcatgttgagccttgctgagagattcacaaacaagctggagcagcccaggttcacatggttaccacattatttggctaaagctattaatctctgtggtcaggcctgtaaagctggtctatctgtgcagattgcgcataaccaggaagt

SEQ ID NO: 563 - DNA, 112 bp, Homo sapiens
  source 1..112: mol_type = genomic DNA
gccttctatcccagctgttcttacagaaattaagtttcactttctcatcaggctatggttgagaagtatgtctcatttatagtgccttctgtgatcttaggacatgtgacta

SEQ ID NO: 564 - DNA, 508 bp, Homo sapiens
  source 1..508: mol_type = genomic DNA
tgtgatttcagacagcatccttctcactaacttgctgccttcttggaataagaatttccaagatgtctcaggaggtaccaagggagcagcaacaaggcctaatgatcacttcttcaagaatttatcccaagaaatgcattgtatcttaagttggggaacacttttacctactcaaaaatcttttgaggtattcagataaatccatgatctgagttttatgttaatagttttacagtgtcatagtgtggtaattaagtgtagaattttaacctctgaggctgggcgcagtggctcacgcctgtaatcttagctttttggaaggctgaggcagaagaattgcttgagaccagcccaggcaacatggcgaaaccttgtctctacagaaaaatacaaaaattagctgagtgtggtggatcatgcctatagtcacagctactggggatgctgaggtgggagggtagtttaagcaagggagtttgaggtggcagtgagcctagttggcactatt

SEQ ID NO: 565 - DNA, 30 bp, Homo sapiens
  source 1..30: mol_type = genomic DNA
ggacaagaattttgggcagatttgaatgcc

SEQ ID NO: 566 - DNA, 98 bp, Homo sapiens
  source 1..98: mol_type = genomic DNA
tttgaccaactacgaaggctgtccacaccaccctctagcaatgtcaactctatttaccacacagtctggaaattcttctgtagggaccactttggatg

SEQ ID NO: 567 - DNA, 88 bp, Homo sapiens
  source 1..88: mol_type = genomic DNA
tgtcattcgattgattgaagaagccaactctcggggtctgaaagaggttcgatttatgatgtggaataaccactacatcctccacaat

SEQ ID NO: 568 - DNA, 160 bp, Homo sapiens
  source 1..160: mol_type = genomic DNA
ggtggggttcccacacaagctcctccacctcttgaagcaacttcatcatcacaaattatctgcccagatggggtcacttcagcaaacttttaccctgaaacttgggtttatatgcatccatctcaggacttcatccaagtccctgtttctgcagaggata

SEQ ID NO: 569 - DNA, 396 bp, Homo sapiens
  source 1..396: mol_type = genomic DNA
atgaaaagttcaagacggccgggcgcagtggctcaagcctgtaatcccagcactttgggaggccgaggcgggcagattacgaggtcaggagatcgagaccatcctagctaacacggtgaaaccccgtctctactaaaaatagaaaaaattagctgggcgtggtggcgggcacctgtagtcccagctactcgggaggctgaggcaggagaatggtgtgaacctgggaggcggagcttgcagtgagccgagattgcgccactgcactccagcctgggcgacagagccagactccgtctcaaaaaaaaaaaaaaaaaagttcaagaatcaagagagctttattgtagccagtgtcaaatgaggaacataatagtaaacatttgcacagaatttatgttc

SEQ ID NO: 570 - DNA, 35 bp, Homo sapiens
  source 1..35: mol_type = genomic DNA
caggaaaatgtttggccgtgacaggataataaatg

SEQ ID NO: 571 - DNA, 26 bp, Homo sapiens
  source 1..26: mol_type = genomic DNA
gaccctcgagtctgtggaaagcatgc

SEQ ID NO: 572 - DNA, 130 bp, Homo sapiens
  source 1..130: mol_type = genomic DNA
tccaaaggagtccacttcatgtttctggccaaagtgctgacgggcagatacacaatgggcagtcatggcatgagaaggcccccgccagtcaatcctggcagtgtcaccagtgacctttatgactcttgtg

SEQ ID NO: 573 - DNA, 30 bp, Homo sapiens
  source 1..30: mol_type = genomic DNA
tacccttattttgttatccaatatgaagaa

SEQ ID NO: 574 - DNA, 521 bp, Homo sapiens
  source 1..521: mol_type = genomic DNA
gcttgggcctggtagaagtttgaccaaatggaatggaggctgtgagcaatgtgaggattctatttatttatttacgtttgataaaacttactggaactagtactaccatgcgtattccctgtccaaagcatcactgctttggtatagtataagttcatgaaattctggtgggtagaaagaaatttttatttctatcagcagtactaaaatgtatcagccaaccagagaacatcagtgactttaacttctgcagagtttgccccagaattcagagttctatttagaggaagttaaaacaacaacaaaaaacaaccatttgaaaaatttttgtcaccagcaaaacttttcactaattagtgatatgaaatgtgatttttgtgttgttaaacttcagctttggaaaactcagtctctttcattatcatccattccaatttgaaggagttgggcagctaatttggttaaaggcagtcttgagggttagaagtattacttccttttcgggttccagacctagcttg

SEQ ID NO: 575 - DNA, 49 bp, Homo sapiens
  source 1..49: mol_type = genomic DNA
aaacttggaaattgtgccagtggtccagctggagcacaacgtttggtga

SEQ ID NO: 576 - DNA, 261 bp, Homo sapiens
  source 1..261: mol_type = genomic DNA
tcagagaggtagcaactaggtaaactccttataaaaagcaaatacctggatttacaaaagtgaaagtagttgttcacaaaagaattcgccatggaattctttcagttaccaagctctcctggtaatgtttgtggttatatcatttacacaaaacttttcaggaacttctgtgttgtttaagcaagatgtatctgtactgatgtctcagtgaatcagtctgtttattaagcacttatcagggcttccacacacttatttatt

SEQ ID NO: 577 - DNA, 27 bp, Homo sapiens
  source 1..27: mol_type = genomic DNA
atgcgcaggagcgacaataagatggcg

SEQ ID NO: 578 - DNA, 34 bp, Homo sapiens
  source 1..34: mol_type = genomic DNA
gccattttcgagtgaaggacccggagccgaaaca

SEQ ID NO: 579 - DNA, 36 bp, Homo sapiens
  source 1..36: mol_type = genomic DNA
gtgggtactacacaaccgtctccagccttggtctga

SEQ ID NO: 580 - DNA, 299 bp, Homo sapiens
  source 1..299: mol_type = genomic DNA
gccagcgtccgacttgaagttgctagtggttagtcccagccttcgcccttcgcggtccgaccgctgagaggagggagacttcgttatgccccgggccgtcaacggcgccaggagctaaagggcgggcagacgaaagcgggcggcgagtcgccagttagtcttcaccgctctggagagagttgctagccacgggatcctgacccggacacgaactcgtttctccacgtcggtgcgcgcttgcatccctggccccgaaagcgtgggaatgtccggaaatgctggcgtatgggagttcctta

SEQ ID NO: 581 - DNA, 28 bp, Homo sapiens
  source 1..28: mol_type = genomic DNA
gcacgtctagattttcccacttacatag

SEQ ID NO: 582 - DNA, 109 bp, Homo sapiens
  source 1..109: mol_type = genomic DNA
agtcctgccttcttgccactcgtgtctttcgatggctcccttcccgaagtcccgctgcctctaagcggagtgttaagcggggctctcggaagccggtggaccgagattt

SEQ ID NO: 583 - DNA, 49 bp, Homo sapiens
  source 1..49: mol_type = genomic DNA
ggcgggcgcggtgtagcggcccgcgggctgacttgctcccggctgtccc

SEQ ID NO: 584 - DNA, 26 bp, Homo sapiens
  source 1..26: mol_type = genomic DNA
atgccccgtaaaggcacccagccctc

SEQ ID NO: 585 - DNA, 56 bp, Homo sapiens
  source 1..56: mol_type = genomic DNA
ccctgacggcgccagcagcgacgcggagcctgagccgccgtccggccgcacggaga

SEQ ID NO: 586 - DNA, 177 bp, Homo sapiens
  source 1..177: mol_type = genomic DNA
cctccgtggtgttagattgccgttaaagagaagacgataatttatttgaagccactgtagcttttgtgagtccaggagttgggtgacattattaaaccctcgtggcagtgtcgctgaagttcatgagtttccaaaatgaaggttccaggtgctcagcggtacggagaattgcatcta

SEQ ID NO: 587 - DNA, 31 bp, Homo sapiens
  source 1..31: mol_type = genomic DNA
tgaggaacttgataatagaagtttagaagag

SEQ ID NO: 588 - DNA, 31 bp, Homo sapiens
  source 1..31: mol_type = genomic DNA
ccagaacttcaaatcctatgctggggagaaa

SEQ ID NO: 589 - DNA, 159 bp, Homo sapiens
  source 1..159: mol_type = genomic DNA
cgcttttcctgtattatcgggccaaatggcagtggcaaatccaatgttattgattctatgctttttgtgtttggctatcgagcacaaaaaataagatctaaaaaactctcagtattaatacataattctgatgaacacaaggacattcagagttgtaca

SEQ ID NO: 590 - DNA, 176 bp, Homo sapiens
  source 1..176: mol_type = genomic DNA
ttgagaaagggaccaaaacagcatggaaaagtatcaattctttgctaagttgggttattaatgagaactactggcagtttgtgtgcatgttcaattgaagtttttaatccatagaattagtttcagtatgaaatgagtgaattttgaagtaggcctatgacttaataccaacaatt

SEQ ID NO: 591 - DNA, 47 bp, Homo sapiens
  source 1..47: mol_type = genomic DNA
aaggggatgattatgaagtcattcctaacagtaatttctatgtatcc

SEQ ID NO: 592 - DNA, 118 bp, Homo sapiens
  source 1..118: mol_type = genomic DNA
aacggcctgcagagataatacttctgtctatcacataagtggaaagaaaaagacatttaaggatgttggaaatcttcttcgaagccatggaattgacttggaccataatagattttta

SEQ ID NO: 593 - DNA, 76 bp, Homo sapiens
  source 1..76: mol_type = genomic DNA
ctgtagcagcacatcatggtttacatgctacagtcaagatgcgaatcattatttgctgctctagaaatttaaggaa

SEQ ID NO: 594 - DNA, 59 bp, Homo sapiens
  source 1..59: mol_type = genomic DNA
gtaaatattggcgtagtgaaatatatattaaacaccaatattactgtgctgctttagtg

SEQ ID NO: 595 - DNA, 284 bp, Homo sapiens
  source 1..284: mol_type = genomic DNA
gtgtttgatttacctaagcacctagttaatttaatctttgtaacactttggatggttaacttaacctttactcaagttggtttttgttttgttgaaaatgacttacttggtggaaccactactactgaaagaacgaaactttgatattacattgttaagtatcagagctgttacagagcaagtccttttaaagagatgtaaaaattaagtacctgtgccaaactgatttttattagaaaccctgttttctttaagtaaaagtatattctaccagcatggcttgg

SEQ ID NO: 596 - DNA, 62 bp, Homo sapiens
  source 1..62: mol_type = genomic DNA
tatccacaactagggtgaaggtggtggagagcagcaaggaagctacctctaaccaaccagaa

SEQ ID NO: 597 - DNA, 412 bp, Homo sapiens
  source 1..412: mol_type = genomic DNA
ctcaaagagtggtataactggatcataatatccttgtttgccactcaagaaagtgttccataacttaagataacagtggtgggaaaaatcatttaagaccttgtttcatatgctttaagatacaagaaatagagataacactgggaacatatgaaactttgtcagcatcagataatagtgttgtagcgacttgaaacattttttgtctgtgattgtgccagtcactatttgtgacttggattgaaccttgatatgactttaaattcaggttgatgttttaaaattatttctgaaatatattgagcttattgccctaaattaaaactatattctgtaattttacatgagttatgtaagttttctgaagaaataaggaggaatcctttaggcacagactgtcaatctacagatt

SEQ ID NO: 598 - DNA, 65 bp, Homo sapiens
  source 1..65: mol_type = genomic DNA
actcttggctttattatttaactgctcccaattctcacttaagattgatttagctaaacatacac

SEQ ID NO: 599 - DNA, 25 bp, Homo sapiens
  source 1..25: mol_type = genomic DNA
gaacaaattgctatgatgaaaccaa

SEQ ID NO: 600 - DNA, 58 bp, Homo sapiens
  source 1..58: mol_type = genomic DNA
agatataattggttgtggacggctaaatgaacctattaaagtcttgtgtcggagagtt

SEQ ID NO: 601 - DNA, 40 bp, Homo sapiens
  source 1..40: mol_type = genomic DNA
ggagagaaaaacatagctatcgaatttcttaccttggaaa

SEQ ID NO: 602 - DNA, 68 bp, Homo sapiens
  source 1..68: mol_type = genomic DNA
gtaagtgccttgattgatattaccaatttttatattagtttttaaccattaagtcaaagcccttctct

SEQ ID NO: 603 - DNA, 90 bp, Homo sapiens
  source 1..90: mol_type = genomic DNA
aaggaattatgtggtgaacttatccaatgtgaggactatctggctgtgacacctgtcatcccgttgatcaccagggttgaatttattaaa

SEQ ID NO: 604 - DNA, 77 bp, Homo sapiens
  source 1..77: mol_type = genomic DNA
ttatgagttgcagaaacgaattgctgaaatggaaactcaaaaggaaaaaattcatgaagataccaaagaaattaatg

SEQ ID NO: 605 - DNA, 86 bp, Homo sapiens
  source 1..86: mol_type = genomic DNA
gataattgtattacatgtgtatttatatataaagttacttctagcacattgtgagtgtaagacatttgccagcatatcaagtggtg

SEQ ID NO: 606 - DNA, 447 bp, Homo sapiens
  source 1..447: mol_type = genomic DNA
ccctagtggcgtagcacagtaacaaacaataagcatttggcttcacagtttaatcttttagtagtccacaaatctgatagagggataggatttgggtttttctagatagatttttaagggttttatcatgtccctacttgatgccatttttcaatgacactagtatctctaattatttttaaataaaaaaatttgtatagtaagtttattgtatagtaacttgtaagtatattcgtaaaaggtaaaaccaaaattttactcctatggtaaaatttttatatacctagacattgtagtcactggaaaatgtgttattttccctccaacttagaaaggcaaaatagctgtcataatcaaaaatacaggtgcttcttcaactatggggagagggatcatcttggaataaggagagttttaggatcctgccttattaagagcctggacata

SEQ ID NO: 607 - DNA, 99 bp, Homo sapiens
  source 1..99: mol_type = genomic DNA
attacaaaatttattgaggagaataaagaaaaatttacacagctagatttggaagatgttcaagttagagaaaagttaaaacatgccacgagtaaagcc

SEQ ID NO: 608 - DNA, 264 bp, Homo sapiens
  source 1..264: mol_type = genomic DNA
tccgtgtagtcagagcatatttatagctaaagaagaataattacaacctgaaatcaggagagaaggatgacagacctgaggccctgccagagacagttttccttcataagaggtcaggtgtttgtagaagtagttttactattagattgagagaatatagaaattacagtgaatagtcgggaaaatacttgttaaagctagctaatttaactctgattataaagaaaagaagaactagaggaccctgagaaatgcctttaaata

SEQ ID NO: 609 - DNA, 115 bp, Homo sapiens
  source 1..115: mol_type = genomic DNA
gccaagagtaacaatatcattaatgaaacaacaaccagaaacaatgccctcgagaaggaaaaagagaaagaagaaaaaaaattaaaggaagttatggatagccttaaacaggaaa

SEQ ID NO: 610 - DNA, 95 bp, Homo sapiens
  source 1..95: mol_type = genomic DNA
tgaaacctgaactggtaagtttggacttttaatgtccaacattcctaaaactagtcaacctagacttagatgactattcttttaattcctgctga

SEQ ID NO: 611 - DNA, 255 bp, Homo sapiens
  source 1..255: mol_type = genomic DNA
gtcaatggataatgcagtagctttcatgatgggatacttcatagttagtggattttcactgtttgcttatttaatatatattgagtactcatgtgccctgcaccccatgttaatgacaaagctaggcctcaaatgtctttattcctcagcgtaatgatcgatctcacaaagctcttgtgaaatcagttgggaaaagactatgtacagtgaatattgacaactaggcaaaaactgaatctagtccacttgtgagaa

SEQ ID NO: 612 - DNA, 109 bp, Homo sapiens
  source 1..109: mol_type = genomic DNA
aagcacgttcaaagatggatgtagcccagtcagaacttgatatctatctcagtcgtcataatactgcagtgtctcaattaactaaggctaaggaagctctaattgcagc

SEQ ID NO: 613 - DNA, 404 bp, Homo sapiens
  source 1..404: mol_type = genomic DNA
aaagaatgaggtcagcatttcagtattccatatgtgaactgagactatcaagaaactatattatccccagaagcaccatatagtaagtaaatcaccaccaccaccccactgtagaaataatttaaacaaaagaaagtttgtgtttctttaaatcttaagtatagacaatttaaagataaataaaaaacaagtgtatatgtatttatataatgaatatacaaacaactatcttaatgtgttttgggttttgaatttatggatgtagtttctttgcttgcattccaaaatgttataaactaactaagatgtatagcttatcggtgcctgtcccccatccttgagtgaattagatgtctaaggaatttcgtaaactttaatctccaaagatctccaaaacctcagta

SEQ ID NO: 614 - DNA, 60 bp, Homo sapiens
  source 1..60: mol_type = genomic DNA
aagagctcattagcaatgaatcgaagtagggggaaagtccttgatgcaataattcaagaa

SEQ ID NO: 615 - DNA, 170 bp, Homo sapiens
  source 1..170: mol_type = genomic DNA
tgacaaccatatttcaagtgtcactgtatataaaataagattcattttgtttgttttaaggcacatttatttttaaacattttgcccttacagtttcttgtttacttagctttagataaatacaattatttcatacatatcaagaaaaatactagtaatgtcacacaaac

SEQ ID NO: 616 - DNA, 106 bp, Homo sapiens
  source 1..106: mol_type = genomic DNA
ggggacttaggagccattgatgaaaaatacgacgtggctatatcatcctgttgtcatgcactggactacattgttgttgattctattgatatagcccaagaatgtg

SEQ ID NO: 617 - DNA, 212 bp, Homo sapiens
  source 1..212: mol_type = genomic DNA
ggctgtatgggcgaaaaagatgaccgaaattcaaactcctgaaaatactcctcgtttatttgatttagtaaaagtaaaagatgagaaaattcgccaagctttttattttgctttacgagataccttagtagctgacaacttggatcaagccacaagagtagcatatcaaaaagatagaagatggagagtggtaactttacagggacaaatca

SEQ ID NO: 618 - DNA, 25 bp, Homo sapiens
  source 1..25: mol_type = genomic DNA
gaagaatgggttcctcacttgttat

SEQ ID NO: 619 - DNA, 38 bp, Homo sapiens
  source 1..38: mol_type = genomic DNA
cagttgcaaaacgactctaaaaaagcaatgcaaatcca

SEQ ID NO: 620 - DNA, 50 bp, Homo sapiens
  source 1..50: mol_type = genomic DNA
gtgaacgagaaatgaggaacacactagaaaaatttactgcaagcatccag

SEQ ID NO: 621 - DNA, 32 bp, Homo sapiens
  source 1..32: mol_type = genomic DNA
ggaacttgaagctaatgtacttgctacagccc

SEQ ID NO: 622 - DNA, 531 bp, Homo sapiens
  source 1..531: mol_type = genomic DNA
tactggccaggctttgttttaggtcctactgatagagcagtaaacaaaaataaagtctcttcccagggagcacacatgtaagatggcacatatttgagtggaggcccaaagaaagtatgagtgctaacccatgtatgtttgagaaaaaagcattccaagaagagtataaaggagcaaatacaaaggctgaagcaggagtatgctgggaacacaaaccattgtggctggaataaaggacggaagaacccagattctctgaggccttcacccacactcccctttccctgcaagcacccacaacaatggctttgatggtacctgatggtcaattgagaagccaaaatgtatatctgtgctattaatggcaacattttcatggagagactgcaagagtctatatgtgtttcatccttatttgaaaaggaatccttgactttgttaggagctctatatatctcctctcatagaaatgccatatattatcaggagactgttaatatctcatgtggaggacccatttgtgcaagcata

SEQ ID NO: 623 - DNA, 296 bp, Homo sapiens
  source 1..296: mol_type = genomic DNA
acttttactcttcgttgtcacaggaaggaacgctaattcatcttatatcctccactttgttttaatgtggagaactgcgaagttatgttagcagaagaaaataaccacaatttcttcattgtgggcaagttaatattgagttaggcacatagtgtatctaaggctaaaaatcattatgaactcagtagtcaaggaagtgccctaagaaaaagttgtaaagatattttaaaagaagctgagaacatgaagccattaagaaatggtgtgtttacagccgagctagtgtgtttaacttt

SEQ ID NO: 624 - DNA, 144 bp, Homo sapiens
  source 1..144: mol_type = genomic DNA
gctgaggttaaacgcttacacaataccatcgtagaaatcaataatcataaactcaaggcccaacaagacaaacttgataaaataaataagcaattagatgaatgtgcttctgctattactaaagcccaagtagcaatcaagact

SEQ ID NO: 625 - DNA, 213 bp, Homo sapiens
  source 1..213: mol_type = genomic DNA
gtagagtatgcatgttaccctaacttgttttccctttccctgccttcacattggaaagggggttactatgtaatgttccataaaatgtttctcttactgttaatttattgaacctgtctgacacattacctaatgggacttccatgacggaaaacctataatgaacatttatcctatggccaattaaaaaggctggtaaacaggtatgccata

SEQ ID NO: 626 - DNA, 105 bp, Homo sapiens
  source 1..105: mol_type = genomic DNA
tgtcttgcgtacagagaaagaaataaaagatactgagaaagaggtggatgacctaacagcagagctgaaaagtcttgaggacaaagcagcagaggtcgtaaagaa

SEQ ID NO: 627 - DNA, 130 bp, Homo sapiens
  source 1..130: mol_type = genomic DNA
tccagaaagaacatcgcaatctgcttcaagaattaaaagttattcaagaaaatgaacatgctcttcaaaaagatgcacttagtattaagttgaaacttgaacaaatagatggtcacattgctgaacataa

SEQ ID NO: 628 - DNA, 139 bp, Homo sapiens
  source 1..139: mol_type = genomic DNA
aagagatttcggttctaagcccagaggatcttgaagcgatcaagaatccagattctataacaaatcaaattgcacttttggaagcccggtgtcatgaaatgaaaccaaacctcggtgccatcgcagagtataaaaagaa

SEQ ID NO: 629 - DNA, 27 bp, Homo sapiens
  source 1..27: mol_type = genomic DNA
attttccctatcataatcttttcacag

SEQ ID NO: 630 - DNA, 144 bp, Homo sapiens
  source 1..144: mol_type = genomic DNA
tatgaagatcttcggaaacaaaggcttaatgaatttatggcaggtttttatataataacaaataaattaaaggaaaattaccaaatgcttactttgggaggggacgccgaactcgagcttgtagacagcttggatcctttctct

SEQ ID NO: 631 - DNA, 66 bp, Homo sapiens
  source 1..66: mol_type = genomic DNA
gttcattggctttagtatttgctcttcaccactacaagcccactcccctttacttcatggatgaga

SEQ ID NO: 632 - DNA, 26 bp, Homo sapiens
  source 1..26: mol_type = genomic DNA
gtgatttacctgttattacttaatgt

SEQ ID NO: 633 - DNA, 135 bp, Homo sapiens
  source 1..135: mol_type = genomic DNA
gcacagttcataataatttctcttcgaaataatatgtttgagatttcggatagacttattggaatttacaagacatacaacataacaaaaagtgttgctgtaaatccaaaagaaattgcatctaagggactttgt

SEQ ID NO: 634 - DNA, 84 bp, Homo sapiens
  source 1..84: mol_type = genomic DNA
ttcaagttgattcagtgtattactgatttttttctatttgtaaaggattatgagttgtataaaatacatactccctaaactaga

SEQ ID NO: 635 - DNA, 121 bp, Homo sapiens
  source 1..121: mol_type = genomic DNA
caaggttgtgctatcaaggctcagcataccttcgtgggcctttgatttaccaacactggaaatgcctgccaactaatcttggatagattctttaaggcattccacttagcttgccagttga

SEQ ID NO: 636 - DNA, 403 bp, Homo sapiens
  source 1..403: mol_type = genomic DNA
gcctaggctatctcgtaagttgaaaaatatcccactatagttgcttcatgagtatgaagtaagatggcctctgatttacactggttcaatttacaaattttcaactttatgataggtttatccgggtactaaatgcatttcaacttgatagtttcaacttatgataggtttaccaggatgtagtcccactgttgaggagcatctatttaggggttaattactttagtaataagtggaaagtaagataccttgagtaatgtttgcctataaaattgtcagcgtatttttacactattggctcaagaatgttataatgctaagggacataagttggcaaccacttggtttttggaaggactttcggtattgtattagaagtctgccctagctgttaaatttctgg

SEQ ID NO: 637 - DNA, 38 bp, Homo sapiens
  source 1..38: mol_type = genomic DNA
gatgtaactattttgctttgtaaatatcctgcctttaa

SEQ ID NO: 638 - DNA, 176 bp, Homo sapiens
  source 1..176: mol_type = genomic DNA
tgtttcttaatagctgtactctatctcttcagtaagtaatttgccaggagaaatacaatgtttttaaggaatatttttgtcagcgtaaactgttaaacactgaatcccaacttttagctatctgaaaaatgtatacttaaataatacattatggccatttgactcaaatgtaagtt

SEQ ID NO: 639 - DNA, 223 bp, Homo sapiens
  source 1..223: mol_type = genomic DNA
tctctttcctggtaagcagggagtcaaaacaatagcaagaaaatgccagaaatagaatttctactactttgtaaactctaggctcgtgggtctcctagctctcagtacctggctcactgtaggatgggtagatgggtgaatgaatggataaagaaaggaagtttgttcaccggagaggagatgaatttcagtaagtttcatgtaacagtgatcaggagaaata

SEQ ID NO: 640 - DNA, 668 bp, Homo sapiens
  source 1..668: mol_type = genomic DNA
ggctgtcacctattttgccaacacgtgaattcaaaacatgaaccggtttgcttttggagaatctgaagactccagtttgaggaatcctttgcttccctggaggtagatgctgtctgcaaatctagaatgacagcaggagtccagtcaagaggtcctgtcaggccaaggccagaaagaagggaggacaatccctggggccagatgcccagtgtgaggggaggcatgatctgtcccatggctgtggccactgcaggaaggtctgtgaaaaggaggtgacaggcccagtcacctcctcttcacccaagtgattgctccttcaactgctatctgtgaaaatagcctttgttatgaagaaattgactctctctctctttttttttttttggagttgcctaggctggagtgcaatggtacgatctcagctcactgcaacctccacctcccaggttcaattgattctcctgcctcagcctcctgagtagctgggattacaggcatgtgccaccacacccggctaatttttgtatttttattagagacagggtttcaccacgttagccaggctcgtctcgaactcctgtcctcaggtgactacccgtctcggcctcccaaagtgctgggattacaggcatgagccaccacacccggccaaaaatggattctctatg

SEQ ID NO: 641 - DNA, 170 bp, Homo sapiens
  source 1..170: mol_type = genomic DNA
ctgctgggactagatagtggatgaagaaagaaggacgaggaagccgtggggcagcctcttcacatggggacaggggatggagcatgaggcaagggaaggaaaagcagagcttatttttcacctaaggtggagaaggatcactttacaggcaacgctcattttaagcaacc

SEQ ID NO: 642 - DNA, 53 bp, Homo sapiens
  source 1..53: mol_type = genomic DNA
tcgggctgtttgctcagggaaggcaagaaagccacgtgctggccctctgcctt

SEQ ID NO: 643 - DNA, 283 bp, Homo sapiens
  source 1..283: mol_type = genomic DNA
caaggcttttttcagtagcgtcctatggatgtcacattgtacatcaaacaaccttgtgattataaaacgatcctgggaaggagcccctaactagggcaagtcagaaatagccaggctcgcagcagcgcagcgctgtgtctgctgtgtcctggggcctcccttgttccgacctgtcaattctgctgcctgtcacgcgggtggttctgcccatcgcggctgcgggtcaagcatcttcaagggaaggacggactggaggcctcaccgtggactcaactctgcattc

SEQ ID NO: 644 - DNA, 81 bp, Homo sapiens
  source 1..81: mol_type = genomic DNA
gcctcagctgtgtcggtatgatcttgtcctgatggaaaacgttgaaacagtcttccaacctattctttgcccagagttgca

SEQ ID NO: 645 - DNA, 64 bp, Homo sapiens
  source 1..64: mol_type = genomic DNA
ctctaataggcccaaggtacaagctcaggattctccgaatgaagttaaggtcccttgcccatcc

SEQ ID NO: 646 - DNA, 58 bp, Homo sapiens
  source 1..58: mol_type = genomic DNA
tcagaaatatcaccaagtgagtctacttgcaagatttaatcaagatctggataaagtg

SEQ ID NO: 647 - DNA, 66 bp, Homo sapiens
  source 1..66: mol_type = genomic DNA
ctttgtggatattataacatggaacaagaatgtaagaagaggggacattaccatcaaattgagaga

SEQ ID NO: 648 - DNA, 69 bp, Homo sapiens
  source 1..69: mol_type = genomic DNA
tattatgctgataattggaaagaccatctaagggggaaagatcctccaatgacgaaggcattctttgac

SEQ ID NO: 649 - DNA, 128 bp, Homo sapiens
  source 1..128: mol_type = genomic DNA
accaccagaggtctgtatacctgtacctgtcttccctgagagagagctgcaccatcactgcgtatccctgtgactcctaccaggattataggaatggcaagtgtgtcagctgcggcacgtcacaaaaa

SEQ ID NO: 650 - DNA, 71 bp, Homo sapiens
  source 1..71: mol_type = genomic DNA
ctgggctacaaggagccattaggaaacatagacttctacccaaatggaggattggatcaacctggctgccc

SEQ ID NO: 651 - DNA, 194 bp, Homo sapiens
  source 1..194: mol_type = genomic DNA
ctgcacccgacctatatatacatttctaggtcctcattttctagaagtagttccaatctttttaccatcctagctctcaaatatttaaagattttatctactaagtaaacattcattttttcctgtatcctatttattagttatacaaatgcaaatagaggctcagaagcaccaggcaattaaagggttgcagc

SEQ ID NO: 652 - DNA, 94 bp, Homo sapiens
  source 1..94: mol_type = genomic DNA
cctgcaggccctttattcaacgggaaacctcaccaagacagattagatcccagtgatgcgcagtttgttgatgtcatccattccgacactgatg

SEQ ID NO: 653 - DNA, 74 bp, Homo sapiens
  source 1..74: mol_type = genomic DNA
tgatgacatttacatgatcggagtaagtctaggagcccacatatctgggtttgttggagagatgtacgatggat

SEQ ID NO: 654 - DNA, 28 bp, Homo sapiens
  source 1..28: mol_type = genomic DNA
ttacaatgatggacctcttgaaattcca

SEQ ID NO: 655 - DNA, 252 bp, Homo sapiens
  source 1..252: mol_type = genomic DNA
aggctgatgctctacacaaggaaaaacctgacctgcgcacaaaccatcaactcctcagcttttgggaacttgaatgtgaccaagaaaaccaccttcattgtccatggattcaggccaacaggctcccctcctgtttggatggatgacttagtaaagggtttgctctctgttgaagacatgaacgtagttgttgttgattggaatcgaggagctacaactttaatatatacccatgcctctagtaagaccaga

SEQ ID NO: 656 - DNA, 29 bp, Homo sapiens
  source 1..29: mol_type = genomic DNA
tattcatcagtttgttgtgcttgtcaaga

SEQ ID NO: 657 - DNA, 82 bp, Homo sapiens
  source 1..82: mol_type = genomic DNA
ctcactgtgagcaaaatcccacagtggaaactcttaagcctctgcgaagtaaatcattcttgtgaatgtgacacacgatctc

SEQ ID NO: 658 - DNA, 72 bp, Homo sapiens
  source 1..72: mol_type = genomic DNA
tgcaatgtcagctatttaggacagaaacatccaaggccgtgtcagaactcaattacgactacatatgcatta

SEQ ID NO: 659 - DNA, 63 bp, Homo sapiens
  source 1..63: mol_type = genomic DNA
acgccaactataggactcgtgcttctcgtacgctgggctataatctatgaaactgagctccag

SEQ ID NO: 660 - DNA, 30 bp, Homo sapiens
  source 1..30: mol_type = genomic DNA
cctcataacaagtctaactggctctggaaa

SEQ ID NO: 661 - DNA, 47 bp, Homo sapiens
  source 1..47: mol_type = genomic DNA
acagatgagatattctacacattaatctacttatctggaatcacttt

SEQ ID NO: 662 - DNA, 109 bp, Homo sapiens
  source 1..109: mol_type = genomic DNA
cacagcttccttgtcggaggggaaaaggacaggtgatctggggaaaacgcagctacacctggagcaaggtctcttcccggcttggcaatctcagctgtgccggcgctac

SEQ ID NO: 663 - DNA, 104 bp, Homo sapiens
  source 1..104: mol_type = genomic DNA
ctgctgccttcggtgactatatgagaatggaaacttctaaggaagccaggttgttagaattgttaccccctttactcagagataacatagattatccaggctga

SEQ ID NO: 664 - DNA, 29 bp, Homo sapiens
  source 1..29: mol_type = genomic DNA
aattttcaacacagactccctgcttctca

SEQ ID NO: 665 - DNA, 71 bp, Homo sapiens
  source 1..71: mol_type = genomic DNA
tgttcaaatctccatttgttgacagacaaagccaacaatactctaaactgaggcctgcaagtcatttcatt

SEQ ID NO: 666 - DNA, 138 bp, Homo sapiens
  source 1..138: mol_type = genomic DNA
ttcacctcctacaactccgaagaaaacccttactgtccaagaccgtcaccagcaaccatccgcagtcattcaagtggaagctttcacagcttttgtacattctctgtgtcaatatacaactgagttacagactgtccc

SEQ ID NO: 667 - DNA, 366 bp, Homo sapiens
  source 1..366: mol_type = genomic DNA
catcaggacttgtattagcaggttctggctagagagactatctcctgtcatcacgatcaattaatgttttctggtgatcacatcaggccctatctaagaagctcatggtatacaagggtcacccaaatagctgagtgcagtccttgctcatatttccttcatcttaaccccgcaaacaagaattaagatgatcccaataaaagaaaaattgctcaggaaactgaacctttttctgaaccaagcactgtcagcaaatctcaggtattagagcaactatggttgattgaaaagtgtctcaaaatctgggccaagaatgattgctaggtccataagctaatttgtctggccttgccatttacgtaagcc

SEQ ID NO: 668 - DNA, 281 bp, Homo sapiens
  source 1..281: mol_type = genomic DNA
tgggatggccgttcaggaaatcttctgtttgctttgcacgctcctgagtataggacaaagcgctgttgtttaagaacataaataacaaaagctttgttcttccaaaccgagagggaaactgtagatctatccaaaatgacttggtcttaaactgcctaaggatgacaagaatgaaatattattttaggctgcccatcagcatccgtctctcaatctcctgtcttggcttcagaaaacaatgactcaatatggtctttttctgacacattgcagccttagga

SEQ ID NO: 669 - DNA, 128 bp, Homo sapiens
  source 1..128: mol_type = genomic DNA
tgctcttcttggtcccactcaaatgggaagttctgctcgaggccagaaatagaaaacaggaagtcaacagaactgattttcctaactgcccaaatgcaaatcaccacactccgttatggatgagaatt

SEQ ID NO: 670 - DNA, 270 bp, Homo sapiens
  source 1..270: mol_type = genomic DNA
ttgccctcacatacacataagtttgtcattgttcttcagttctttgggtaatctcttcctagaaactgcatctaacaaatagaccacatccccaaattccatcatgtccaaaaagaagcacggtatttccatcaacaccccagctgccatcaccaagccaactcgcctgacttccattcacttactagcaaacatttaccaagtatctgccatgttcattttgtcaatgagaatgacatgggacttgttcctctaggagatcacagtcta

SEQ ID NO: 671 - DNA, 2253 bp, Homo sapiens
  source 1..2253: mol_type = genomic DNA
cctgctgcccaataacctgatgttgtcactctcatatttaaaacccataagtgctgccgggagcggtggctcacgcctgtaatcccagcactttgggaggccgaggcgggcggatcacaaggtcaagagatcgagaccatcctggccaacgtggtgaagcccagcctctactaaaaatacaaaaattagctgggcggggtggcacacacctgtagtcccagctacttggcaggctgaggcaggagaattgcttgaacccggaggcagaggttgcagtgagccgagattgcactactgcactccagactggtgacggagcgagacgctgtcaaaaaaacaaaacaaaacaaaaaacatatcaatgctgatgaaccaagtgcaaagccctgagcttggccaggcaacatagcctggaaacctgacttttaatccttactttgctctattcccccaacatacacacacttcatacaccacacctaaaagagacttcccacagttttccaaaaatgactcacatttatatttcctgtttttccctttgcccaccctgccctctctccctctgccttcatttttttaattaacctctggaactcaggtgctcctgctccaaggtttaggtcaaaagttacctcctccatgaagctttctctcattctcccacaatgtgtgaaagccccattctcagatttgcttagttgtgcatttgtatattctaccttgcactacagtcatttgtatatttatcttatggtttctgtgccttaggaaaggtacactgtcttaatcatctttgttcaatacagtgcctagcagagtgcctcaagtataatatgtgctcaataaataatagatgcatttttccatgcatattttctactatatcgaagtggaaaatatatccatgtgatatagtgaaaaatatctcatgaagagagatacagtgaggaaaatatctcatgaagaccaaaaagcagaaatccaagttttttcttttcattactatcatcagtgattattaattttatgtgtcaacttggttgggcttagggatgctcagatagctggtaaaatattatttctggatgtgtctctcagggtgtttctgggggaaattagcatttgaatcagtagactaaataaagaaaatctgccctcacaaatgtgagccagcatcatccaatttattgacagtttagatacaacaataaggcagaagaaggtgaactctctttccttgagctgggacatccatcttctcctgctctgacattggagtttctagttcttgggacttcagattctcccctgaagtttctcaggccttttggcatcagactggaagttatgccattggctcccctggttctcagacctttggactcagactgaattataccactggctttcctggttctccagcttcaagatgacatattgtgagacttttcaacctccataattgcatgagccaatttccacaatatatctcctcttatgtatctatatatttcctattggttttgtttctctacagaatcctaatagatcatctaattgtttatctaacaagtattttcctccctagacaatatgttgggcactagggacacaaaaataaaaacacagacatctgcactcaataaacttacattcaatatcagagagattggcacagaatacaaataaaatgagatacatgcaaaataatatgaattgcaaaattacggcaattcaccaccaactaggtgtgtgaccgtgggaaaatcacactgtgagctaaatattagcaagtttaaaatgcaaaatcagaggcagtctatgaattggactttgctaatggcctcctttgctgatggatggcacattggtgttagaaagtgcttatttttgcaaaggtccattattgatgctttaattctaaggaaattatgtaggcagaaactaaagaaaggttaaaaaaacagcagctaaaattgatacttagacaataaaaaactaattataagtgatttatcagcaccactagataactacattggtgaaatttaaggccatgaaatgcaggacaagcctcgtaggaagcaaggtcccagtggatgagatgctgtcctctgggctcctaaccttccaccactagtattcaccatatctgattggaaatgtgtgcatgtgagtcggcctcccctctatgatgtgagtagggacctatttttgctcatctctgtatcctctacacacgatgcttgg

SEQ ID NO: 672 - DNA, 39 bp, Homo sapiens
  source 1..39: mol_type = genomic DNA
ggagctaaaagaagaaatagtcaaaattttctaaatgag

SEQ ID NO: 673 - DNA, 118 bp, Homo sapiens
  source 1..118: mol_type = genomic DNA
ctgccttgtacttcatgcaggttgaacagaaatgttttctgagcatgtattgttacagccctctgagatggtataaaagaatgaaagaagacacgacctgccttccaggagtttcaca

SEQ ID NO: 674 - DNA, 46 bp, Homo sapiens
  source 1..46: mol_type = genomic DNA
agggaaaagcatttctaatggaggagatggctgtggagaggagagg

SEQ ID NO: 675 - DNA, 35 bp, Homo sapiens
  source 1..35: mol_type = genomic DNA
accttccaccctttcactatgaaggaccctcacca

SEQ ID NO: 676 - DNA, 30 bp, Homo sapiens
  source 1..30: mol_type = genomic DNA
agattgcatatgtattgggaagctcctggg

SEQ ID NO: 677 - DNA, 92 bp, Homo sapiens
  source 1..92: mol_type = genomic DNA
tccactttcctgtgaggtcaaatgcggtaaagggatgctccaaccctaccctccatgtacctgcctttcctgtgattccgaagaaggggtgg

SEQ ID NO: 678 - DNA, 62 bp, Homo sapiens
  source 1..62: mol_type = genomic DNA
ctattaattaatccagagaagtgtgttgctataaaatattctgtgaagcattttcacttatt

SEQ ID NO: 679 - DNA, 26 bp, Homo sapiens
  source 1..26: mol_type = genomic DNA
tttgaagaactagagaaaatcatcat

SEQ ID NO: 680 - DNA, 214 bp, Homo sapiens
  source 1..214: mol_type = genomic DNA
gggatttgctggcattgatttcccaggatggcaaagtgctaagaactaaacctttaaagctaacaaaatgtactgatgtctttgcaaagtatccaagaccaacaagaaagtaatttcccacctcaccctaccaccacccagaaaaggagcacagagatggggaagagagtggctgcatctggcatccagccagaggagtccgtgcagggattct

SEQ ID NO: 681 - DNA, 39 bp, Homo sapiens
  source 1..39: mol_type = genomic DNA
gatgatgcagctccctcaagtatcacatgaagatagtgg

SEQ ID NO: 682 - DNA, 120 bp, Homo sapiens
  source 1..120: mol_type = genomic DNA
cagcaatgtatgaggtccaaggaccaggaccaaagggaaaaacagccatctcaccagacacctgcctacgaccagatgcgtcatctccaatattagctaactccctggaacctggactca

SEQ ID NO: 683 - DNA, 498 bp, Homo sapiens
  source 1..498: mol_type = genomic DNA
ggcctctcaatcaattacaaaactgagaattctgacagttttgtgtatttcctctttgcatgtgatgtatatgtgtgtatttgtatatattaaccattttcctttttctctcttcattattttatgaaagttgttgaatataaactctacaatttagcctttaggtaagagaatattcagtgggactttgatttgaggagtatttaagacagccagatgagactacgataactgttggaactgtgtgtctcctcatttggggaaaggggtgagaactctgcatttctctgaagaacagagttgactttgtgttatacagagttcaaatatatatataaaatggtgcatgtggaagctaagaagccaaaggagttcaccaagacagttatcaatatattgcctctccgctccaaatccacccttctttgccctgttccacgatactaatctggctcctcggtcagccagtgcaatgtcatctgttgctggtagagtgta

SEQ ID NO: 684 - DNA, 65 bp, Homo sapiens
  source 1..65: mol_type = genomic DNA
ttaaaccaggagtgcgccgcgtccgttcaccgcggcctcagatgaatgcggctgttaagacctgc

SEQ ID NO: 685 - DNA, 118 bp, Homo sapiens
  source 1..118: mol_type = genomic DNA
ggcttagatggctccgagcccgtttgagcgtggtctcggactgctaactggaccaacggcaactgtctgatgagtgccagccccaaaccgcgcgctgctcgggaccttagagcctctg

SEQ ID NO: 686 - DNA, 79 bp, Homo sapiens
  source 1..79: mol_type = genomic DNA
tgttccgctgtttagctcttgttttttgtgtggacactcctaggatagaaagtttggtatgttgctatacctttgcttc

SEQ ID NO: 687 - DNA, 27 bp, Homo sapiens
  source 1..27: mol_type = genomic DNA
gcacccgtgtggttgctaaggatgggc

SEQ ID NO: 688 - DNA, 173 bp, Homo sapiens
  source 1..173: mol_type = genomic DNA
tatacaaggctgcagtcggatacactggtattgtggacgtggcctggagctggacgagacatttagtgtactttttgggcaattggagtcgtttgttattggtcctttttcatttttaatatcttaatgagatgatttaaggaagttactgaatctctgctattaggcctatc

SEQ ID NO: 689 - DNA, 53 bp, Homo sapiens
  source 1..53: mol_type = genomic DNA
gatctcaagtttcaacaccacgttttggcaaaacgttcgatgccccaccagcc

SEQ ID NO: 690 - DNA, 90 bp, Homo sapiens
  source 1..90: mol_type = genomic DNA
gtaagtgttggctataaagacactgtttaaacacttaagcacttttgactcttaaaatgactattggcatcatcctacgtagctttcttc

SEQ ID NO: 691 - DNA, 57 bp, Homo sapiens
  source 1..57: mol_type = genomic DNA
ctgcctcagatgatgcctatccagaaatagaaaaattctttcccttcaatcctctag

SEQ ID NO: 692 - DNA, 208 bp, Homo sapiens
  source 1..208: mol_type = genomic DNA
atgagactgtctgaatctgggttgctttggacaagtgtacttgttgatggaattatttgcaaggtatcatcttaggtcaggaggggaataggaacaaagatgtagaagacattgttcctgtctgtaaaagcttatcacctagaggaggtaagatgtattcatgaacattgaataagtcccattgtggacagtctttctcacaaggctt

SEQ ID NO: 693 - DNA, 70 bp, Homo sapiens
  source 1..70: mol_type = genomic DNA
ctgaagagcaccagattgcgcacctccccttgagtggagtgcctctcatgatccttgacgaggagagaga

SEQ ID NO: 694 - DNA, 74 bp, Homo sapiens
  source 1..74: mol_type = genomic DNA
ctgttgcagtctccttcaagcattctgtcgaccctggatgttgaattgccacctgtttgctgtgacatagatat

SEQ ID NO: 695 - DNA, 31 bp, Homo sapiens
  source 1..31: mol_type = genomic DNA
tcttagtgcttcagagtttgtgtgtatttgt

SEQ ID NO: 696 - DNA, 150 bp, Homo sapiens
  source 1..150: mol_type = genomic DNA
ttattctgtgccctgttgacttcattcactgttaacatttgacatagaatgattagttattaaatcagggtgaagtgcttacctggtcagtgtaggctcttcagataattttgacttaatatttttgatactccttgtgcatttacattc

SEQ ID NO: 697 - DNA, 773 bp, Homo sapiens
  source 1..773: mol_type = genomic DNA
tcttaaagtatctgcgtagacattcatagcaaagaatttatgacatatcagatagaaatacattaaaatgtagtgttttcccagagattgatctggctttttttttttgatatacataagataccactttataaagaagctccatactatagaacctcccctaacaggcttaaaataccttctttttttttttttttttttttgagaacggagtcttgctttgtcacccaggctggactgcagtggcatgatctcggctctgcaacctccatctcccaggttcaagcgattctcctgcctcagcctcccaagtagctgggattacaggcaggcaccactatgcctggctaattttttgtatttttagtagatatggggattcaccatgttggtcaggctggtctcgaactcctgaccttgtgatctgcctgcctcggcctcccagtattgggattacaggcatgagccaccatgcccggccttaaaatgccttcttaaaggaaaaatgccaactccatccttaatctcaaggaaatctgattgtccaaatagatctgttaatatgtaacatattaataggtaacttgctgtgtaaaattataagccatattttaaaaggttttaaaaatacttattgtgctccatttgtgatataatttctaacatttctgctctgtgatgggggtttatttgtaagaataagaggcaaaggaatgttagcatagcaaaaatgtgtttgaatgagttaaccttttaatcgcaaccctatgtga

SEQ ID NO: 698 - DNA, 269 bp, Homo sapiens
  source 1..269: mol_type = genomic DNA
tgccaaaagatcctgtcgttgcataatcaaacagttggtattctcgtgccgttgttcaaagtcatgtgtttctttcatttggtgctgaaaatttctgttcaatcattgacaaatatttattgaacacccactctgtgccatgtaaaactatgtcaggtgctggatatgttgatgaatgaaacagactctatccttatacaatttgagtcttgtgggctcagaagtaaattctgtgaaagctggacggatagtcgaattgagtgctctta

SEQ ID NO: 699 - DNA, 212 bp, Homo sapiens
  source 1..212: mol_type = genomic DNA
cctcctaattgtgggattgtcagaactgaacacatatcatttgattagtgcatattttttatagtacctgaaaaccaagattttgaaaaaattttcaagacagagaattttgataaatcctgacattgacctaattgacataggtaaatatgtttgtatatgtgctaataattttctaatttcggaacacgatgatgttatgactattgatt

SEQ ID NO: 700 - DNA, 205 bp, Homo sapiens
  source 1..205: mol_type = genomic DNA
ctaccagtcgtaaagtgacattttttggttattgttgagactgcttgcccgtgggctcagaagtgagatttgcattattcttctgttggattctgatagaaaaaaagacattcactgtataagaaaatggatggactgaaccaattagaattgataccagtgaaatttttatattgcttacaattggtaaccaagagtgctgata

SEQ ID NO: 701 - DNA, 125 bp, Homo sapiens
  source 1..125: mol_type = genomic DNA
tgttcgttctcgttgttgggatgcctgtatggttgtggatggaggaacttcttttgagtttaatgatggtgcaattgcttcgatgatgatcaataaagaagatgagcttcgaactgtgcttcttg

SEQ ID NO: 702 - DNA, 104 bp, Homo sapiens
  source 1..104: mol_type = genomic DNA
tcactgctctacagtccggaagaaccaaaaatacttttcagtattcgagaaccaatagcaaatagagttttctcaagcagtcgtcagcgttgtttctcctcaaa

SEQ ID NO: 703 - DNA, 44 bp, Homo sapiens
  source 1..44: mol_type = genomic DNA
gagaattagtgctgttagagaaagaatacttatgaagaaatctg

SEQ ID NO: 704 - DNA, 41 bp, Homo sapiens
  source 1..41: mol_type = genomic DNA
gaaatttgagtcttccattgaacagagaattggtagagaaa

SEQ ID NO: 705 - DNA, 26 bp, Homo sapiens
  source 1..26: mol_type = genomic DNA
cattcaatattaacagggttgcaact

SEQ ID NO: 706 - DNA, 84 bp, Homo sapiens
  source 1..84: mol_type = genomic DNA
atgagatttcagttgatgatggtccatgggaaaaacagaagagttcagggctcaatttgtgtactggaacaggatcaaaggcct

SEQ ID NO: 707 - DNA, 62 bp, Homo sapiens
  source 1..62: mol_type = genomic DNA
aatgtcttattcttgggctgtagcagtggacaatttaagaagaagtatacccactctaaagg

SEQ ID NO: 708 - DNA, 269 bp, Homo sapiens
  source 1..269: mol_type = genomic DNA
gctgagagctagctttgctttataattttgtacttactaaaaaattaaataacttataaatggaggaaaacttggatcagttgatagattttgggggagttagtgaaatttcttgaggggattttcaatcgaatgcttttattttctgtggcagtaatgatctggttggtttatctcataaataactgatgctgctgctttttgtgttctttgatgtctcaccttatgtttttactaagtaaggacagcaatggattggcttctgatgc

SEQ ID NO: 709 - DNA, 61 bp, Homo sapiens
  source 1..61: mol_type = genomic DNA
cccaacttctgccagtgagagcactaaatgaagtcttcattggggagagtctgtcatccag

SEQ ID NO: 710 - DNA, 32 bp, Homo sapiens
  source 1..32: mol_type = genomic DNA
catttgctgcttaaatccaaaatagttctctt

SEQ ID NO: 711 - DNA, 109 bp, Homo sapiens
  source 1..109: mol_type = genomic DNA
tggaactggagaacacacttttttagctcatcacatggcttttggcagaaggcttcagttcctcaccatgttggtctctccaaagggttgttcatgttatctcttcctc

SEQ ID NO: 712 - DNA, 101 bp, Homo sapiens
  source 1..101: mol_type = genomic DNA
tggaggcagagaatcaggttataccttgaagggactggcataaaccctgtacctgtggaccttcacgagcagcagctaagcttgaatcagcacaatagagc

SEQ ID NO: 713 - DNA, 158 bp, Homo sapiens
  source 1..158: mol_type = genomic DNA
gctatatctagctcagtatcttggactttatgggttcttgatagagtttgacttaatttaagttacttgggagattttgtacaagcacattaggtgtttccgttataattgaaaagagaataaatattcaaatctgtcattgataaggaagctatagg

SEQ ID NO: 714 - DNA, 78 bp, Homo sapiens
  source 1..78: mol_type = genomic DNA
agggtcatttatgcctgcccgttcgatatacacattcctttccagaagccttacagaagttctatcgtggtgagttca

SEQ ID NO: 715 - DNA, 66 bp, Homo sapiens
  source 1..66: mol_type = genomic DNA
gctgctggcagcgagtaaagtcttggacagacttaaaccagttataggggtaaacactgatccaga

SEQ ID NO: 716 - DNA, 82 bp, Homo sapiens
  source 1..82: mol_type = genomic DNA
ggaattgaggttcgtctagtaaagaggagagaatatgatgaagagactgttcgatgggcagatgctgtcatagctgcaggag

SEQ ID NO: 717 - DNA, 43 bp, Homo sapiens
  source 1..43: mol_type = genomic DNA
tacagtggacttcttgaacgacatcatattcacaccaaaaatg

SEQ ID NO: 718 - DNA, 112 bp, Homo sapiens
  source 1..112: mol_type = genomic DNA
aagcaaatccaagtggaacaaaggtcatctaaccgcctctacaagtattagtttatctttggtcatcaagtagccatatgcagtgtgttaaaaagtcatcaaggctgaggca

SEQ ID NO: 719 - DNA, 39 bp, Homo sapiens
  source 1..39: mol_type = genomic DNA
attaacactaatgattttgagccataagattatatttga

SEQ ID NO: 720 - DNA, 196 bp, Homo sapiens
  source 1..196: mol_type = genomic DNA
gaggcttttggctaggcattaaattttggcacaggctgtctaatctattatagtatatcttggtaagttaacatctattaattaattttcacaatagccaaatgcttcctcagcttctcttttgtgagaacataacgaaaattacaaagcaaggacaaaactatttaaaaactcttaacccagtattcgtaggcaa

SEQ ID NO: 721 - DNA, 36 bp, Homo sapiens
  source 1..36: mol_type = genomic DNA
atgtatcttattttcctggggcttgccgagagccag

SEQ ID NO: 722 - DNA, 33 bp, Homo sapiens
  source 1..33: mol_type = genomic DNA
catctcaagccaaagttccctaacagtcaacgc

SEQ ID NO: 723 - DNA, 403 bp, Homo sapiens
  source 1..403: mol_type = genomic DNA
cccattgattgaccagtgacttattttgtgatatcagatttctggtcaaacattttacctctactgtctcatgacctttcaaaggccagtaaaactattattacaatttacttgcatcattaagagatgtagctgttggcaaatgtgcaattgctattaacagggtccttgacacaaattagaactctagatgaaacaaaactgacttggaaaggattttgacaccagaaacatacctcattggtcaaaaaaaggttttatttaaagctctttttcacctgtcaccagggatggggaactgaataaggaaaaaaaattttaatgtagaacaaataagaagtcagcagtttctgccctcctctccatcattccaggtctcacaactcggcaacccttttactgg

SEQ ID NO: 724 - DNA, 29 bp, Homo sapiens
  source 1..29: mol_type = genomic DNA
gaaaaggagagtgcccggtgctaccatga

SEQ ID NO: 725 - DNA, 58 bp, Homo sapiens
  source 1..58: mol_type = genomic DNA
gtacgttattaaggagaaatgtcaggacaaggggctggtatactgggtagtgtgtgaa

SEQ ID NO: 726 - DNA, 80 bp, Homo sapiens
  source 1..80: mol_type = genomic DNA
gccttttccttgctggaacgtggtcgttggacactacgagcttgttttaaaagcacaggtctttggtgctaagaaggaaa

SEQ ID NO: 727 - DNA, 37 bp, Homo sapiens
  source 1..37: mol_type = genomic DNA
actgcgaggcctagggcactccggaaagtccttcagc

SEQ ID NO: 728 - DNA, 34 bp, Homo sapiens
  source 1..34: mol_type = genomic DNA
cgagcagcagcggtaccgttacgcggagctctcg

SEQ ID NO: 729 - DNA, 54 bp, Homo sapiens
  source 1..54: mol_type = genomic DNA
ggcccacgatgacttgctaccgaggcttcttgctgggcagctgttgtcgcgtgg

SEQ ID NO: 730 - DNA, 39 bp, Homo sapiens
  source 1..39: mol_type = genomic DNA
ccggcggtagggagctgaggcaaggggcccgagcccaag

SEQ ID NO: 731 - DNA, 168 bp, Homo sapiens
  source 1..168: mol_type = genomic DNA
ccactagctggggcctccatttcttccccgcccacctttctcccgcgtggggtctcccgtttcccaatcgccacgctttccccgccttcgtcaacgcctgggtacgtccccctagccgcgtgggccacgcacgtcctggcacttaacctctgcccgtccggcgcgaag

SEQ ID NO: 732 - DNA, 131 bp, Homo sapiens
  source 1..131: mol_type = genomic DNA
aaagagctccggaaacttgccctgaaggagatgggaactccagatgcacactttgataccaggctcaacaaagctgtctgggccaaaggaataagcaacgtctcatactgtatccatgttcggttgtccag

SEQ ID NO: 733 - DNA, 94 bp, Homo sapiens
  source 1..94: mol_type = genomic DNA
tcagttggtcacgtggttgttcggagcgggcgagcggagttagcagggctttactgcagagcgcgccgggcactccagcgaccgtggggatcag

SEQ ID NO: 734 - DNA, 71 bp, Homo sapiens
  source 1..71: mol_type = genomic DNA
ctgtggccttttgcgaggtgctgcagccatagctacgtgcgttcgctacgaggattgagcgtctccaccca

SEQ ID NO: 735 - DNA, 81 bp, Homo sapiens
  source 1..81: mol_type = genomic DNA
aggcgcacagcctctagacgactcgctttccctccggccaacctctgaagccgcgtcctactttgacagctgcagggccgc

SEQ ID NO: 736 - DNA, 36 bp, Homo sapiens
  source 1..36: mol_type = genomic DNA
gttgggaggtgagtcgagggactgccccattggctg

SEQ ID NO: 737 - DNA, 69 bp, Homo sapiens
  source 1..69: mol_type = genomic DNA
actgcccgccccctagcctggcgctgggcctccgggacaagttggctgggtccgggcttggggactgca

SEQ ID NO: 738 - DNA, 342 bp, Homo sapiens
  source 1..342: mol_type = genomic DNA
ttgcctcgaccttccagcactttggtgatcatgcaggtgatccgcctgcctcgacctcccaaagtgctgggattacagatgtgagccaccacgcccggcctttcctaagcttttttgtttgcacatgtgtgtgcacgcgccaggacacaaggtaaaatgtattaatgttagaagccactgcactgagtaaaggcatggccacaaaaattagggacatctatcgacgaggcacaggcgcagacacggcaggggccaatgggtagtgggcagtgggcagtgggcagtggagcagcagttcagatgctgagtttggcccagtggtctagtcaaccgcattacata

SEQ ID NO: 739 - DNA, 230 bp, Homo sapiens
  source 1..230: mol_type = genomic DNA
caggaaagttaagatgctgctctttaggatggacctgggcataccctagtatctgtttattttgctttttctggtgactatttaatccaggacaatatgtttagaaattttaaaccagttttagaaattggtttaaaatacattaatttcattttttcagctataattattatgtgtgtatatatgtaaaatatagatatcaagagtcattaactttagtcaccttagtc

SEQ ID NO: 740 - DNA, 25 bp, Homo sapiens
  source 1..25: mol_type = genomic DNA
tcttctgtgcttcaccatctacata

SEQ ID NO: 741 - DNA, 31 bp, Homo sapiens
  source 1..31: mol_type = genomic DNA
atgaagcagaaacaagaagaaatcaaagaga

SEQ ID NO: 742 - DNA, 153 bp, Homo sapiens
  source 1..153: mol_type = genomic DNA
tgtagaaagcatggggctaaaagtattttgacataatttatccaaatttagcctggctataatttctgtaagccttgagttagtcagaggatgagtaacaatagagaacatttttaaaaaactaattacggttgaatattaagtctgacccaa

SEQ ID NO: 743 - DNA, 647 bp, Homo sapiens
  source 1..647: mol_type = genomic DNA
gcactgacattttagccaccttctaatgaatgggcttgaagcagaactgcttctactatcaggtaatggttgaggggggatgtctattacacatgtactttgttttgtgtaaagtatgttctggaaagttacattcttttggtgagtacatgtaagtatttgagggatattcatgatttaaggaggcctgaaatgaatctttttgattagggaaagaaatattttgcagtgtaaatgattaaccatttcttccagtttacctgtttggtgagttcataccataaatgttacgatgtttggttttataaaagagtacctgtaagtttttagtttctgtgtggaagattttttcagagagaatacagatagccttcttgtattagaattttgtcatatgtggtttgaaactgttcattggagctgaggaattttgttacgtttgttttaactagatatgattaacaaaatgaccatagcaagagcatgcattgaaatgagagaagttacgtgtgtttgtgtctagtttgggtaatatgattcattcttaagaattcttcaaactttattataatttttggaaataacaagtttgtcagttgattaaaccagtgtcttgttcataggcgaccttacgcaattatatagca

SEQ ID NO: 744 - DNA, 30 bp, Homo sapiens
  source 1..30: mol_type = genomic DNA
aatagttctgtcccaagaagaactctgaag

SEQ ID NO: 745 - DNA, 30 bp, Homo sapiens
  source 1..30: mol_type = genomic DNA
ctgcatctggatctcttgttggaagagaaa

SEQ ID NO: 746 - DNA, 151 bp, Homo sapiens
  source 1..151: mol_type = genomic DNA
ttcagctaagctcttgaccccagtctaatccaaaataattgttgcaaataaaattcctaaaatgttactatatgttttggtagaatttttaattgtataacttttttaaagatccagagatgtgaaaaagttagatatgcgtactcttttt

SEQ ID NO: 747 - DNA, 101 bp, Homo sapiens
  source 1..101: mol_type = genomic DNA
tgaccacttaacatctacaacttccagccctggggttattgtcccagaatctagtgaaaataaaaatcttggaggagtcacccaggagtcatttgatctta

SEQ ID NO: 748 - DNA, 25 bp, Homo sapiens
  source 1..25: mol_type = genomic DNA
ttatgaattctgccaattactgtaa

SEQ ID NO: 749 - DNA, 183 bp, Homo sapiens
  source 1..183: mol_type = genomic DNA
tgctgaaggtcacagtaacatttggactcattttgaattgccttgaagacaggaagaagagaaatagatggtaggatttttattaggcaaaattaggaaaggttgactggatagaaataaagcagctctttaaaaatattgtagattgaagagcaggatttgtgacactcatatctgattagg

SEQ ID NO: 750 - DNA, 38 bp, Homo sapiens
  source 1..38: mol_type = genomic DNA
gtggaacacattatccttgtaaccctctgcgatacatg

SEQ ID NO: 751 - DNA, 78 bp, Homo sapiens
  source 1..78: mol_type = genomic DNA
taaaataactgcgaagaaatcccaaactttattacatttgttgtttgaactttattatatttgttgacagtggtatta

SEQ ID NO: 752 - DNA, 39 bp, Homo sapiens
  source 1..39: mol_type = genomic DNA
agaaaaacggagaaaggcgctgtatgaagcacttaagga

SEQ ID NO: 753 - DNA, 61 bp, Homo sapiens
  source 1..61: mol_type = genomic DNA
gaatcccgttgtgttgagagtcaattctatgctgcatgtcctccatgttatatacttggag

SEQ ID NO: 754 - DNA, 37 bp, Homo sapiens
  source 1..37: mol_type = genomic DNA
aaaggacaatgaaattgcccgcctgaaaaaggagaat

SEQ ID NO: 755 - DNA, 153 bp, Homo sapiens
  source 1..153: mol_type = genomic DNA
tgaatggtgaacctctggataattttgaatcactggataatcaggaatttgattctgaagaagaaactgttgaggattctctagtggaagactcagaaattggcacgtgtgctgaaggaactgtatcttcctctacggatgcaaagccatgta

SEQ ID NO: 756 - DNA, 111 bp, Homo sapiens
  source 1..111: mol_type = genomic DNA
tgccgaagtttacctccactagttctttgtagcagagtacataactacataatgccaactctggaatcaaatttccttgtttgaatcctgggaccctattgcattaaagta

SEQ ID NO: 757 - DNA, 50 bp, Homo sapiens
  source 1..50: mol_type = genomic DNA
gtgaataggattttctcagttgtcagccatgacttatgtttattactaaa

SEQ ID NO: 758 - DNA, 46 bp, Homo sapiens
  source 1..46: mol_type = genomic DNA
ttgtgtataacttagaataatgaaatataaggagtatgtgtagaaa

SEQ ID NO: 759 - DNA, 106 bp, Homo sapiens
  source 1..106: mol_type = genomic DNA
ggctgcggccggcacagcgccagggcgagtgaggcgggtggcgcgggggaggcggcggagtaaagagaggccgccggctgggtccgcgggtcactccgaggcgcgg

SEQ ID NO: 760 - DNA, 158 bp, Homo sapiens
  source 1..158: mol_type = genomic DNA
ctccttcgacgaggcgctgcagcgggtgggcgagttcgggcgcttccagaggcgcgtgtttttgctgctgtgcctgacgggcgtcaccttcgccttcctcttcgtcggcgtggtcttcctgggcacgcagcccgaccactactggtgccgcgggccaa

SEQ ID NO: 761 - DNA, 139 bp, Homo sapiens
  source 1..139: mol_type = genomic DNA
cggccaacgacagcgcctccgccactagcgctctcagctgcgcggacccactcgccgccttccccaaccgctcggctccccttgtgccgtgccgcggcggctggcgctacgcccaggcccactccaccatcgtcagcga

SEQ ID NO: 762 - DNA, 53 bp, Homo sapiens
  source 1..53: mol_type = genomic DNA
gaagccggcgggagaggacgatgctggctcccaggcggacaagccgcgtgtga

SEQ ID NO: 763 - DNA, 112 bp, Homo sapiens
  source 1..112: mol_type = genomic DNA
ttccggattcgcttatggtctccagggtcaaaggaaagggcgaaccaacgtttgaaggcagcagcagcttttttccagttgcccaaatggttactcaaaatgcaaggggaca

SEQ ID NO: 764 - DNA, 168 bp, Homo sapiens
  source 1..168: mol_type = genomic DNA
gtgcacgagaacgtcccatccagggacccacggatacttcgttcctgccagggtctcctttgggccgacagagttgtctctaattgagtgcaggcagccccggagcccgccgagagctgaggctgggctgggctcccggggactcgggcagctatttcaggcagacgc

SEQ ID NO: 765 - DNA, 72 bp, Homo sapiens
  source 1..72: mol_type = genomic DNA
gagggaagtgacctggaagcggagcagaggtcgcagctggcccctgctgggcctagtctcgcttctgtcgtg

SEQ ID NO: 766 - DNA, 49 bp, Homo sapiens
  source 1..49: mol_type = genomic DNA
gcgtgtgcccagcttagatccacctgcagctggctctgaacgctggatg

SEQ ID NO: 767 - DNA, 25 bp, Homo sapiens
  source 1..25: mol_type = genomic DNA
gctcagtgtcttccgctgctgtctc

SEQ ID NO: 768 - DNA, 56 bp, Homo sapiens
  source 1..56: mol_type = genomic DNA
gtggtgttcttgtcatcctggaagccctgccttgggccatgcctgaaatgcactaa

SEQ ID NO: 769 - DNA, 188 bp, Homo sapiens
  source 1..188: mol_type = genomic DNA
tgactcatgcgcatggcatcaaggcagccatgcccaggcccagctcttacctctggggaagatagacagctgacaggtcaggacacagactttggtggcaactgcccgagcacccacatagcaagttgccgaggccaggggcatgcagagccaggaaaacctgggaagatgcataaacaggcccagcc

SEQ ID NO: 770 - DNA, 213 bp, Homo sapiens
  source 1..213: mol_type = genomic DNA
ctgacaccttgcgtgggagacactaacagggagaagagctgagcctcccccagccttctgacctacagcaccatgtgatcatgaatatgtgttattctaagccactaagttggtggtaatttgttatatagcaatagaaaacagatgcattaagtttgtctacaatgcccatgcctgcagtcatattctttggcttcctagaaggtgaccagc

SEQ ID NO: 771 - DNA, 428 bp, Homo sapiens
  source 1..428: mol_type = genomic DNA
ccactgatttcatgacctaactagaaaaacttagactcgcttttggccatggagacatacatttccaacaaaattttacttctgcataataattatttcttaaaatttattacatcttatttttttatcaattatgatctaaagataattgtaattataacccaagcagaaaaaatccaatatttagagacttattgccacaggaaaattttaaaaattaaatgtcaatttatatatgtaacttattgtacatagaagtatggtgacaaaacctataaaatattttctacacgaaatacattacattagaataaaagtctgtggaaatgaaaataagagctcaaagagaaaaaaattgatgtcaaatttcagactattaaagaacagtctgtttatagcaattggacacctgatagcatataatattc

SEQ ID NO: 772 - DNA, 96 bp, Homo sapiens
  source 1..96: mol_type = genomic DNA
tgtctgtgtcaatgcgtggatgctggacctcacccaagccatcctgaacctcggcttcctgactggagcattcaccttaggctatgcagcagacag

SEQ ID NO: 773 - DNA, 971 bp, Homo sapiens
  source 1..971: mol_type = genomic DNA
ccaagtgcgtagtatcccaagtatgtaaaactggttcagcattctaaagtcaattaatgtcatccatcaatcacatcgacaaactaaggaagaaaaaatgacatgatcatatcaatagatacagacaaagtatttgtcaaaatccaacatctatatatgacaaaagctctcagtaaactagaaatataggggaacttcctcaacttgataaggaatgtctattaaaaaaactacagttaacatcatacttaatgacgataaactgtacagaagctttctcactaagatcagaaacaagccaaatatgtcatctctaataacttcttttcaatgccatgctagaagccctcgctaatacaataaataagacaagtaaagaaaataacaggtatactgattggaaaggaagaaataaaaactgtctttgttcacagatgtcatgattgtctatgtagaaaatcaaaagaattaacaacaacaacaaccaaaaaaaaaaactcctgaaactaataagtgagtatagtgaagttgcagggtacaaggctaatacacaaaagtcaactgctttcctatgtaccaacaatgaacaagtaggatttgaatttaaacacataatgccatttacattagcaccacaagaatacacaacacttagatataaatctaacaacatatgtacaagatttatgtgaggaaaagtgcaaaactctaatgaaagaaattagagatgatctaaataaatggagagatattcaacattcatggataggaagactcaatattgtcaagatgtcagttcttcccaacttgatgtatatattcaatacaatactaatcaaaatcctacagagttattttgtggatattgacaaactagttctaaagtttatatgtagagacaaaagacccagaatagccaacgcagtactgaaggagaagaacaaagccagaggactggcactacttaacgt

SEQ ID NO: 774 - DNA, 89 bp, Homo sapiens
  source 1..89: mol_type = genomic DNA
atcctgccttggtgttggcgtcactggggttgtggtggcctttgcaccaaacttccctgtgtttgtgatcttccgcttcctgcaaggtg

SEQ ID NO: 775 - DNA, 141 bp, Homo sapiens
  source 1..141: mol_type = genomic DNA
tgacagaaatagtaggttcgaaacaaaggaggattgtgggaatcgtgattcaaatgttctttacccttggaatcataattctccctggaattgcctacttcatccccaactggcaaggaatccagttagccatcacgctgc

SEQ ID NO: 776 - DNA, 97 bp, Homo sapiens
  source 1..97: mol_type = genomic DNA
cccgttggctgattactcggaagaaaggagataaagcattacagatcctgagacgcattgctaagtgcaatgggaaatacctctcatcaaattactc

SEQ ID NO: 777 - DNA, 51 bp, Homo sapiens
  source 1..51: mol_type = genomic DNA
ggaaaaatcataggacatattaaagaagaaatgattatgaagctctattag

SEQ ID NO: 778 - DNA, 136 bp, Homo sapiens
  source 1..136: mol_type = genomic DNA
cggagaaggttagaatggatttgaaagaatgtggttggattcaaagaagccctaggagacccaacaagtcagcatttttctcttgtgaaaagaaccacctgccaaccccagcctgttccattgctgacatcagagg

SEQ ID NO: 779 - DNA, 67 bp, Homo sapiens
  source 1..67: mol_type = genomic DNA
catttgccaaggtttctggctggcctctggctttgttgaagagatagctagcactagcagggagaaa

SEQ ID NO: 780 - DNA, 203 bp, Homo sapiens
  source 1..203: mol_type = genomic DNA
aggctctctgaacatacaaacagtataactgttgttcactaaatggaaaaatcccaaaatcaaaaaccaatgcaaaacagtgaagtggcttgagctcctaggaggttaggtagaaattaaagagaatcagtggatgggtagaattttaagcagtaggtagttacccaatgtagaacgaggattagcttagacacctagtctgg

SEQ ID NO: 781 - DNA, 46 bp, Homo sapiens
  source 1..46: mol_type = genomic DNA
ctgcccattcctcccgtttttgtatgggatatactcatagagaata

SEQ ID NO: 782 - DNA, 39 bp, Homo sapiens
  source 1..39: mol_type = genomic DNA
gatgaatggtgccaattctaccagcaaagccttcatctt

SEQ ID NO: 783 - DNA, 143 bp, Homo sapiens
  source 1..143: mol_type = genomic DNA
tgtcattcaacaccgaaagatattgaggggaggatgttctcctacacctttaattgaaatggaaattcaatttaaaggtgctttaaagaatgagattgcagccttggagcaggctaggcagacttgtgggatgcctcatcaga

SEQ ID NO: 784 - DNA, 115 bp, Homo sapiens
  source 1..115: mol_type = genomic DNA
acctggttcttcatctggtcctgagtccttgcccattctactgtggctctggccctgcttcattcctgcctgattcatcctcagaaggcaggtttctgtcctgtccctacacatc

SEQ ID NO: 785 - DNA, 191 bp, Homo sapiens
  source 1..191: mol_type = genomic DNA
aattactgtgcttctcgactgtggataaatgagaaaatactcctctctgtgaacgcgctccttcgtggagacagtaatgagtacaacttccagagctctgcgcagccagcaaccctggcaggagtccctgtgttattcataacccagagctgtgttgccatggcagtactgcttgctagaccttggaccca

SEQ ID NO: 786 - DNA, 78 bp, Homo sapiens
  source 1..78: mol_type = genomic DNA
gtgtgctactggcttatggctgatacgtaagagaatctcatctatctctaaatgttctgccttaagccgcacaaagga

SEQ ID NO: 787 - DNA, 37 bp, Homo sapiens
  source 1..37: mol_type = genomic DNA
tgtgcagaaaatattctgcaaatcaagaaccagaaaa

SEQ ID NO: 788 - DNA, 39 bp, Homo sapiens
  source 1..39: mol_type = genomic DNA
aaatggaggaaattccgagatgacagtggttttggttct

SEQ ID NO: 789 - DNA, 86 bp, Homo sapiens
  source 1..86: mol_type = genomic DNA
gctctttgagaatgtagtcgggacttgccccagtcacccttgccctgagaactcagtgactggggctaatgtcaccctggctgtcc

SEQ ID NO: 790 - DNA, 109 bp, Homo sapiens
  source 1..109: mol_type = genomic DNA
ggagacacctaccaggaatctagtgggacaaggtttcagggatcctggaatcctgcccacacccaacagctggaacagttccctcagctggcgagtggacaggtggtct

SEQ ID NO: 791 - DNA, 93 bp, Homo sapiens
  source 1..93: mol_type = genomic DNA
gatgttaaagaccatgttcccatagaaataattcccaaagcattcagaagactgagaagaagtgatgataagaattgttctgggcaggagtgt

SEQ ID NO: 792 - DNA, 26 bp, Homo sapiens
  source 1..26: mol_type = genomic DNA
tttcaaaaattgccgaagtactacag

SEQ ID NO: 793 - DNA, 48 bp, Homo sapiens
  source 1..48: mol_type = genomic DNA
actaacctctgcagtttaaccttgagcgataccttttcccatgaatag

SEQ ID NO: 794 - DNA, 120 bp, Homo sapiens
  source 1..120: mol_type = genomic DNA
agagtgtcgatactaggcaacaagcctctgaacagatagtgttacccggaacatcacccttttctccctttgcttcaaatcaaaaccagcatcccccatttagacagcataaaaggtatg

SEQ ID NO: 795 - DNA, 174 bp, Homo sapiens
  source 1..174: mol_type = genomic DNA
cttcactgagacacaaggaaacttttggggatcatggaaagggtccgtaccacggttgtggtggtggttataagactatatatttgtcaaaagtcttcaaagtgtgcacttagaattgctgaagtttattgtacataaattacatgtaaatatcataaagtgcatgtaaatggt

SEQ ID NO: 796 - DNA, 80 bp, Homo sapiens
  source 1..80: mol_type = genomic DNA
cagatgaggaagttagtaatccatcctttttagatctggtgagaactccccaaatgaggaaatgcacacttattcttatg

SEQ ID NO: 797 - DNA, 202 bp, Homo sapiens
  source 1..202: mol_type = genomic DNA
cgcagtggtgtatcaaggacttgtcatgcgcctgggaattatagggggcaacctctatatagactttttcatctcgggcgtggtggaactgccaggagctctcttgatcttactaaccattgagcgccttggacgacgcctcccctttgcggcaagcaatatagtggcaggggtggcatgccttgtcactgcgttcttacca

SEQ ID NO: 798 - DNA, 38 bp, Homo sapiens
  source 1..38: mol_type = genomic DNA
tatttggtaaattcagaattgtacccaacaacattacg

SEQ ID NO: 799 - DNA, 102 bp, Homo sapiens
  source 1..102: mol_type = genomic DNA
gtttcgctctgttcaggtctgtgtgattttgggggaatcatagccccatttctgctctttcggctagcagccgtgtggctagaactacctctgatcatcttt

SEQ ID NO: 800 - DNA, 266 bp, Homo sapiens
  source 1..266: mol_type = genomic DNA
ttcttaagagccttcatctacattctttgtactaaaagagacctataataattgttaggttcaataatgataatgatagtcatttatcttattataataactatttcattgataattatgatattaatttcatcttattataataactatttcagttttgagagccaattcagttataatgaatggttttaatttactttatattaaagggtgctgataaataatgttcaattagcattctttgggttctgagttaaatgctgtga

SEQ ID NO: 801 - DNA, 51 bp, Homo sapiens
  source 1..51: mol_type = genomic DNA
cagaaagtgctactgtccagcaaagacagagtagtccaggagacaagacac

SEQ ID NO: 802 - DNA, 114 bp, Homo sapiens
  source 1..114: mol_type = genomic DNA
atgaccttcaggactgcagcccacagcccagtggcaggcaggcggggcctgagactgcgaggggagacagccgaatttctaaaaactcagcgacaacagaatgtgataactgct

SEQ ID NO: 803 - DNA, 284 bp, Homo sapiens
  source 1..284: mol_type = genomic DNA
ttcaaagcaagaggatgccgcatcctcaagcacctggtgctagaggatggagtgcagttgtgagctgggcctgaagagaggtggtgccagggcagggcagggactggatccggaagggcctcaaggacatgccaaggctttgctctttatacacacagcagtggaaagtgactggacagtttcaccctgaggtggacagagctggccttgcattgtagaaacacagatatgcaagtgggttggaaggaccccccagcatcgtccctctgatggtagatatgcaa

SEQ ID NO: 804 - DNA, 332 bp, Homo sapiens
  source 1..332: mol_type = genomic DNA
tttgtaagccagtcatcaagcacagatatcatcaaaaagtaaagaatatgaaatatatgagaaatagaggcaataaatgcccaacactcatcagtccctaattcagctactacaccttcagtattacctgtgctcctgagattgtgtctgctgcatctttatggtggaagccccattgatggggctcctgcatcacttcccagtggcccaggcagggatgttgtgtcagtagcctgaagggcccacagtgggagcatttaaaccatgcacattggcagatgctgccaatcagggcttgattgcccaaagagggttgttaggcatttaccagc

SEQ ID NO: 805 - DNA, 101 bp, Homo sapiens
  source 1..101: mol_type = genomic DNA
actggaggaagggttgatccctacagtgaggagcccaaagagacaggcctaggagaaggctggtcccggagtagacaccaggacaagctttccactgtaag

SEQ ID NO: 806 - DNA, 49 bp, Homo sapiens
  source 1..49: mol_type = genomic DNA
aggggcaggtaagtgagagtgtcagtgagcgggcgcagaggggactccc

SEQ ID NO: 807 - DNA, 25 bp, Homo sapiens
  source 1..25: mol_type = genomic DNA
tggaccctaagaaggaactcagtca

SEQ ID NO: 808 - DNA, 202 bp, Homo sapiens
  source 1..202: mol_type = genomic DNA
tatacaggggccgtggtgctactcagggtttgaggaagggagagaacctttgaagctgtggtaagggagagctggggcattgatctgggatgcagaggttgctgtggttgagagctactccagtgagcaacatgatggcttcagagtgagcaggccccatgggagagggcccagctgtgtcttcctggagcggtaacacctt

SEQ ID NO: 809 - DNA, 77 bp, Homo sapiens
  source 1..77: mol_type = genomic DNA
gtatcctggcatccatctgtggtggccttgtgatgcttttgcctgaaaccaagggtattgccttgccagagacagtg

SEQ ID NO: 810 - DNA, 28 bp, Homo sapiens
  source 1..28: mol_type = genomic DNA
gtactgtacaaaattcaatgcaccctaa

SEQ ID NO: 811 - DNA, 2408 bp, Homo sapiens
  source 1..2408: mol_type = genomic DNA
ccctccagagctagataagagtatgcattgttttttttaatgtggttgtgaagagagaagcattttcacataaggtgctaagactcagaagtgatctaaaggcaggaactgctgatgtgggaaagtggaaattgctgggacatacagcagcaggggattaacagtgtggcttactctacagagtgaggatgcgtcaggtctgtctagatggaatggcataggcaggttttcaagactgactacaaagtgaaatgtcactgaacaacatgttatagtatttataaaaaactaaaaccaaaggtgttttctctctgcagctggataggaagacagatgacacacagatgatagataataggtagatgatagataataggtagatggatgatagatagatataatagatgataatcatagatagataagtgatagtagataaatgataaataatagatgatagatgatagatagatacagatagataaatagacaggtagatgataggtaatgtctggatagataggtggatagataaatagataatagatgatagataataaacattagtaggaagatagagagattgagttttggaggggggtgtttaaatagggtataagtaaaactaatacccagccaatatattaacatgaggagtaatgtcaagaaaaattcacattacacaaattctttctaattgtttgaaattttttcattaaaacatagagatatgaatatgagaatgtatagtacaagatgtaaaatattaatatgtgccctctgtggacacaaatgggctgggaagaggggtagggaagggaggaccatcactttcttgccagagacttccatactgtttgattttctttaaaaattagaacacgtagtcttgtgttgcttgtgtagttttaaaaaatgatgtaacagctaatttaacaactaaaaagcaatcttaataatgacttaggaattaagaacatggagctctaaatatttttaatatataaaaaatcctgaggaacagctttcttccctttgattctattccactgactgccttctgtttacacaatgagagtgatgctttcattctttatccccaaaccaatcaggatcagatttgcaaactcatcaggaaaaaatggaagaaaagggagtcctctgaaatcaagacttttctactgcttcagtaacattaaaaataaacagctaggagaggtttttttgtttttgtttttgtttgtttttggcttggggagtgtgggtggaagggggttgtctaaatggtgtgcaaggaaaatcaatacccaactaacatataaacatgaaggattataccagcaaaaatttaaggtacccagattctttctaatttttttctgtttataatttttcataatgaaaagttgggtacattaattaattatacctagtctctatacatgaaaaaaaatatagtagaagtatggtttacagtgctacaatttaagcacattaattgtgatccatggttatttactctacaaaaattacttagtgctaaattactaaaacttgctagcatttcccttttaaaaatcacactggattattttatcgtttctgctggtttttgttcatgttaacagctcatttccaaatatatgttaattcagtagaagttcataaagaacttaaatgctataatgctaacaaacccctgtatcagaggaaccagcccccaatatttcagcataggttctattttccataagtgttggccagctgagaaataaaaagagtacaaagagaggaattttacagctgggccgctgggggtgacatcacatatcggtaggactgtgatgcccacctgagccttaaagccagcaagtttttattaagggtttcaaaaggggagggggtgtaagaacagggagtaggtacaaagatcacatgcttcaaagggcaaaaaggagaacaaagatcacaaggcaaagggcaaaaacaaacatcacaagacaaagagcaaaagcagaatgactgaaaagggtctatgttcagcggtgcatgtattgtcttgataaacatcttaaacaacagaaaacagggttctagagcagagaactggtctgacctcaaatttaccagggcggggtttcccaatcctagtaagcctgagggtactgcaggaggccagggtgtatttcagtccttatctcaaccgcataaggcagactctcccagtgcgactgtttatagacctccccctaggaacgcattcctttcccagggtcttaattattaatattccttgctaggaaaagacttcagcaatatcttccctacttgcacatccatttataggctctctgcaagaagaaaaatatggctgtattctgcccgatcccacaagcagtcagacctta

SEQ ID NO: 812 - DNA, 60 bp, Homo sapiens
  source 1..60: mol_type = genomic DNA
ccacattcctgtaaatgtggcaggaataagaaaaccccagtttcccgctctcacctttga

SEQ ID NO: 813 - DNA, 25 bp, Homo sapiens
  source 1..25: mol_type = genomic DNA
tgtgccttgcagagatgcacgtgtg

SEQ ID NO: 814 - DNA, 497 bp, Homo sapiens
  source 1..497: mol_type = genomic DNA
atctggtcaagggactaagctcctagctgaccattcattctgaagattgcatggaggatgaacatctgggaatcctgttaatgagaaggctgaatcacaggcacctgggccaaagggtgtgagcattcatgttctctgctcaccttggtttccgcacaccttcgcaatgtgaacaggtcaggagtccctcccgtccacctcctctgtaacagctggggttccaggcatggtttaggccctgttccagcaataagaaccaatctgctgtacaatctgaggacttggctctgttatttacaaaatgatgctgtggttctgagattatttgggacatttttggctctcctttagtggacacctagagccacagattcccttctttactaaacaaatcccatggattctgatttctgggtcttaggattttaaaagtgaagggatatttttcttatatttgtgagttcagttccgatggtgcccgtggtcaaaagcgaaaa

SEQ ID NO: 815 - DNA, 90 bp, Homo sapiens
  source 1..90: mol_type = genomic DNA
attgctgactcatggctgtatctggcctaatattgttctggttaatccatctctgactcatggccatatctggcctaatattgttctggt

SEQ ID NO: 816 - DNA, 26 bp, Homo sapiens
  source 1..26: mol_type = genomic DNA
gtgggttcttgtgactgtaccattca

SEQ ID NO: 817 - DNA, 108 bp, Homo sapiens
  source 1..108: mol_type = genomic DNA
gcaaacagcaattaattagctaatagaacaacaaaaggccccatatcctgtagccaattgaagatctgagtttaatcagaccagtgcttcaaaatgggtagagccttg

SEQ ID NO: 818 - DNA, 38 bp, Homo sapiens
  source 1..38: mol_type = genomic DNA
ctgtcctttgcatgtgagtttctgctggatcctttcat

SEQ ID NO: 819 - DNA, 1183 bp, Homo sapiens
  source 1..1183: mol_type = genomic DNA
tgctggctacaatttggaactgtgcagtttaaatatttatttattttgttttgtttttactctttctaatttggatattaggttttgcttcatctgtgttttttttctcttactcagtcaataaccatatctccaaactaaattaacgttactaaagtggggaatttccccttcctatattctcataagtgattgagcatctgtcctcatataggacttgctgccttggaggggaggggccagacctgggaaaaagaggagccatgaataactctgcttcctacatttggcttcttctcttcctccatatccatgatttatatatgtgaaggaagaacaagaaataacttaataggccatttgtcaatgagagtacagtgtaggaagggtggaaagtgaatataaaatctagattggggcttctggtttcctgttcagcctataaggagcttagaatttgccactcagtcttgacaacaagtaaaatgctgaacaaactgaaaaatcaataattcttctcagatccataagagaagtgagattacagggcaaactactaccttcagcatcaccccgcacccccaaccccactaaatagaaagacaggagaatacagagaatcataacacaggcgcagaaacctccttgagagagccagggtagataaacatgaactgtaattgatgaattcctggaggatcactgtggatgacctgaaggattaaaaactctagagggactcactcaaaggagggcccaagcttttgtgattttttttttttttttttttttttttgccacctgaagctctacaaggttccaaaggtgaatattaaggaaaatccctcatgctctggcagccagaggggaaaaggaacaattttgaaatatgccagaatatcgttcttaacaatgtctgccctcaggagaagatgtttaaccagagcctaatcttctggggttttctgagagcctcattgatctgggggaagggaaataccaactccagccccttctagccttccaagtggagaaagagaaacaccaaattctagcctcctctagctttcaacttggaagaagggaaatacccagctccagccccctctagcctttctcccctagttcagaggagagggatagagaagcatttgtgaagttcaccgtttagagacataggttc

SEQ ID NO: 820 - DNA, 417 bp, Homo sapiens
  source 1..417: mol_type = genomic DNA
attaatggcagacaccacagatccaggaaactcaaaggaaatcaagcaagataaacataaaaaagtatacctagttatatcgtagtcaaactacagaaagccaaagataaaggaaaaattctgaaagaagagtggggggataatgtcttactatagtaaaagagcaatgataaaaattacaccctacttcttttcagaaaccaggtaagcaagaagaaagtggaatacttaaagtgtcaagaaaaaaaatccaatctagaattctatactgtgcaaagttatcatttaaaagtgaaggagaaataaagactttgttagacaaaaattgagggaatttgatgccttgtaataaatgttaaaagaaattatttagagagaatgaaaatgatctaggttagaaatccagatctacataaa

SEQ ID NO: 821 - DNA, 39 bp, Homo sapiens
  source 1..39: mol_type = genomic DNA
aggtactcatactactcatgaagtgatacagtgttattt

SEQ ID NO: 822 - DNA, 57 bp, Homo sapiens
  source 1..57: mol_type = genomic DNA
catatggagaccttttccctacaaaacacttttttgagaattagcaaagcatggtgg

SEQ ID NO: 823 - DNA, 92 bp, Homo sapiens
  source 1..92: mol_type = genomic DNA
tggatgactatttgggtggcaagccagtgcagaatagagaacttcaaggatatgagtctaatgactttgttagctatttcaaaggcggtctg

SEQ ID NO: 824 - DNA, 106 bp, Homo sapiens
  source 1..106: mol_type = genomic DNA
ccctccacacgtgttcagttaaagtgtgaggaataccctccccagacaaacatcacagatttccgaaatcaaacacgctccagcaagtgttctgcacaccccactg

SEQ ID NO: 825 - DNA, 148 bp, Homo sapiens
  source 1..148: mol_type = genomic DNA
ggcgtggcatctggattaaatcatgttcttacgaacgacctgacagccaagaggctcctacatgtgaagggtcgtagagtggtgagagccacagaagttccccttagctgggacagtttcaacaagggtgactgcttcatcattgacc

SEQ ID NO: 826 - DNA, 32 bp, Homo sapiens
  source 1..32: mol_type = genomic DNA
aagctttttcatttattcgtccagcagcatct

SEQ ID NO: 827 - DNA, 38 bp, Homo sapiens
  source 1..38: mol_type = genomic DNA
gttagtatagaaacagcactcctcttctaaaaagatac

SEQ ID NO: 828 - DNA, 106 bp, Homo sapiens
  source 1..106: mol_type = genomic DNA
ggtgtggttcctcgtgcaacaaatatgaacgtctgaaggcaaaccaggtagctactggcattcggtacaatgaaaggaaaggaaggtctgaactaattgtcgtgga

SEQ ID NO: 829 - DNA, 35 bp, Homo sapiens
  source 1..35: mol_type = genomic DNA
tggcttccatatggaatgccgagtatgtcagcctg

SEQ ID NO: 830 - DNA, 74 bp, Homo sapiens
  source 1..74: mol_type = genomic DNA
tcttaggggaaaagccagagcttccagatggaggtgatgatgatgacattatagcagacataagtaacaggaaa

SEQ ID NO: 831 - DNA, 29 bp, Homo sapiens
  source 1..29: mol_type = genomic DNA
gggctgccaaacaaattttcgtatggaaa

SEQ ID NO: 832 - DNA, 81 bp, Homo sapiens
  source 1..81: mol_type = genomic DNA
gtaaagatgctaatccccaagagaggaaggctgcaatgaagacagctgaagaatttctacagcaaatgaattattccaaga

SEQ ID NO: 833 - DNA, 33 bp, Homo sapiens
  source 1..33: mol_type = genomic DNA
ccagaaggaggtgaaacaccaatcttcaaacag

SEQ ID NO: 834 - DNA, 121 bp, Homo sapiens
  source 1..121: mol_type = genomic DNA
gcttcgggaaagtttatgtcacagagaaagtggctcaaataaaacaaattccctttgatgcctcaaaattacacagttctccgcagatggcagcccagcacaatatggtggatgatggttc

SEQ ID NO: 835 - DNA, 98 bp, Homo sapiens
  source 1..98: mol_type = genomic DNA
cgtgtagaaaacaatggtaggatccaagttgaccaaaactcatatggtgaattctatggtggtgactgctacatcatactctacacctatcccagagg

SEQ ID NO: 836 - DNA, 42 bp, Homo sapiens
  source 1..42: mol_type = genomic DNA
tgcgttcctgactgttcagttggatcggtcccttggaggaca

SEQ ID NO: 837 - DNA, 147 bp, Homo sapiens
  source 1..147: mol_type = genomic DNA
ggcaaagagcctgttcacctactgagtttgttcaaagacaaaccgctcattatttacaagaatggaacatcaaagaaaggaggtcaggcacctgctccccctacacgcctctttcaagtccggagaaacctggcatctatcaccaga

SEQ ID NO: 838 - DNA, 121 bp, Homo sapiens
  source 1..121: mol_type = genomic DNA
tcctgaaactgccacaaaatagtggctacatctgggtaggaaaaggtgctagccaggaggaggagaaaggagcagagtatgtagcaagtgtcctaaagtgcaaaaccttaaggatccaaga

SEQ ID NO: 839 - DNA, 76 bp, Homo sapiens
  source 1..76: mol_type = genomic DNA
aaaaagactaccagacctcaccactactggaaacccaggctgaagaccatccacctcggctttacggctgctctaa

SEQ ID NO: 840 - DNA, 47 bp, Homo sapiens
  source 1..47: mol_type = genomic DNA
aagagattccaggagagttcacccaggatgatttagctgaagatgat

SEQ ID NO: 841 - DNA, 40 bp, Homo sapiens
  source 1..40: mol_type = genomic DNA
atttatttggattggcaaagatgctaatgaagttgagaaa

SEQ ID NO: 842 - DNA, 94 bp, Homo sapiens
  source 1..94: mol_type = genomic DNA
gtaagctcaatcgatggaccattatagcagtaaccgggcaccattatgaccgagtgtctggcttgctctttgccaccatgtcttacaaaaatac

SEQ ID NO: 843 - DNA, 39 bp, Homo sapiens
  source 1..39: mol_type = genomic DNA
gaggacaccaattgtcatcataaaacagggccatgagcc

SEQ ID NO: 844 - DNA, 750 bp, Homo sapiens
  source 1..750: mol_type = genomic DNA
acaaggcagttatctcattgctgttttgggagaggaacgggaaaagctttttgcttatttgtcttttgaaaattaaggctgggcgcggtggctcacacctgtaatcccagcactttgagaggatgaggtaggcggatcactggggtcaggatttcgagaccagcctggccaacatggcgaaacctcgcctctactaaaaatacaaaaaaattagctgcgcgtggtggtgcacgcctgtagtccctgctacttggaaggctgagacaggaaaattgcttgaacccaggaggctgaggttgcagtgagccaggattgcgccaccacactccagcctgggcaacagagactctgtctcaaaaaaaaaaaaaaaaaaaattaacctcaaccaaacgcctattttttaatgcttagttttggcttgaaattcttcttcacctggagttttcttacgttaatacattaaaataacctgaaggaaactttcgttatgggccaatattagctcttatggaaactgatttatatcttttttatgacctttcaaaagtaaaatactatgcataatctagaaagatttgtcagataggaaattttataatgcattagccattagtcagagttgttttttaacatgccagagaaaaagttgtaatgccttggaagttattctcttttctatagattgtgttcaaaagatgtgtatacttgcaataaggtttatgttaaggtggctttaacaattggttgcta

SEQ ID NO: 845 - DNA, 54 bp, Homo sapiens
  source 1..54: mol_type = genomic DNA
gaattgtattgttatccacttagatacatgtacatgtacagtacatgtttaata

SEQ ID NO: 846 - DNA, 99 bp, Homo sapiens
  source 1..99: mol_type = genomic DNA
aaacactataaagtggcggcgaataaggttcctcctgctgctctcggtttagtccaagatcagcgatatcacgcgtcccccggagcatcgcgtgcagga

SEQ ID NO: 847 - DNA, 34 bp, Homo sapiens
  source 1..34: mol_type = genomic DNA
ccgacgcaccaaggccggcgaggggagggcgtag

SEQ ID NO: 848 - DNA, 76 bp, Homo sapiens
  source 1..76: mol_type = genomic DNA
ttatttgttgctttcgggcactggcttattttctctatgattgcgggaattattgttctgggcttctttaaaacag

SEQ ID NO: 849 - DNA, 75 bp, Homo sapiens
  source 1..75: mol_type = genomic DNA
gattctacccgcaccatgctgcttgtgggtctggtagacaaaaactccgcttcattcggaagctggcgtcctcag

SEQ ID NO: 850 - DNA, 28 bp, Homo sapiens
  source 1..28: mol_type = genomic DNA
ctacatctacatctttatggtattctca

SEQ ID NO: 851 - DNA, 36 bp, Homo sapiens
  source 1..36: mol_type = genomic DNA
ttagggttcggatcccaaatcggcagaagaatgaca

SEQ ID NO: 852 - DNA, 176 bp, Homo sapiens
  source 1..176: mol_type = genomic DNA
gcgggagctataccacgaagagttcgcccgggcgggcaagcaggcggggctgcaggtctggaggattgagaagctggagctggtgcccgtgccccagagcgctcacggcgacttctacgtcggggatgcctacctggtgctgcacacggccaagacgagccgaggcttcacctacc

SEQ ID NO: 853 - DNA, 208 bp, Homo sapiens
  source 1..208: mol_type = genomic DNA
gttctactgttgtatagtgctatgtggtgaatacagttaacaataatttattgtatattttttcaaagctagaaaaggatttcgagtgttcccagtacaaataagtgataactatttgaggtgattgatgtgctaattactctgatttgatcattacacactttatacttgtatcaaaatatcactctgtagccaataaatatgtaca

SEQ ID NO: 854 - DNA, 222 bp, Homo sapiens
  source 1..222: mol_type = genomic DNA
tttgttagccattaaagcagtttgaacttatcctacccatcctcttttccatccctcaggagtaggggacatatatgtaatattgtagcctgggggtggggagtgaggatgaggatggatgtgtgagtctggtttgtactcatcagtcctcactaatctataaccttcgttgaggtgtagtcattccattaattcttgagctttcggctttggcctctgttc

SEQ ID NO: 855 - DNA, 366 bp, Homo sapiens
  source 1..366: mol_type = genomic DNA
agccactactgcattcttctcaggaactctgctttgtttttcccagactaccctagaattgtgggacacggtatcctcatcgtaccagtgccccttggcccagtggcttggatgctaccctcagtcatttctgctctaatgcttaggctcatggaggggtgtaggacaaatcaattggaagggaagtgtgctgggctcttctcaaagattgattgctttgggttagatttcctacttttttcagtcttcttttttactttttgaaccagacaaactagtcttacaccacctcacattcttgcctactctgtgtttcctgcaagatacactccagcccctaagacccacaccgtactgcttaagatg

SEQ ID NO: 856 - DNA, 197 bp, Homo sapiens
  source 1..197: mol_type = genomic DNA
agctgctgtcccttagtattgaatatctctattttcttttaatcatagaattcactgatattttagcagataatgtggccgtccaggcaggcatgagatttctcagccttacttcaacttgattatgaccatgtgacccaattctgacatttgcctaaaggaaaatttacctaaaaaggcgttttcttgctatggca

SEQ ID NO: 857 - DNA, 212 bp, Homo sapiens
  source 1..212: mol_type = genomic DNA
ttctgaatgcatcacggcaaagatgcatgtactcatgaagcataaaattaaaaatatgatacattcactacatgaaaatatgatatacggtttttcttcagtatccgcgggagattggctcgaggaaccccatggataccaacatccttgaatgctcaagtcccttatataaaacggcatagtatttgcataaaacctataccattctcctg

SEQ ID NO: 858 - DNA, 67 bp, Homo sapiens
  source 1..67: mol_type = genomic DNA
atggtgtctgtcctgctgtctctgctgctgcttctgggtcctgctgtcctccaggagacccgagatg

SEQ ID NO: 859 - DNA, 68 bp, Homo sapiens
  source 1..68: mol_type = genomic DNA
tcatgccttgcaggaaaggtttggttgtgagatccagaataacagaagcactggagcattctggaaga

SEQ ID NO: 860 - DNA, 58 bp, Homo sapiens
  source 1..58: mol_type = genomic DNA
agatgttcttcacggtggaaacggcacttacctgacctggttgttggtgcatgtgccc

SEQ ID NO: 861 - DNA, 276 bp, Homo sapiens
  source 1..276: mol_type = genomic DNA
gaggcagccctttcttatgcagaaaatacaatacgcactgcatgagaagcttgagagtggattctaatccaggtctgtcgaccttggatatcatgcatgtgggaaggtgggtgtggtgagaaaagttttaaggcaagagtagatggccatgttcaactttacaaaatttcttggaaaactggcagtattttgaactgcatcttctttggtaccggaacctgcagaaacagtgtgagaaattaagtcctggttcactgcgcagtagcaaagatggtc

SEQ ID NO: 862 - DNA, 616 bp, Homo sapiens
  source 1..616: mol_type = genomic DNA
cttttactctgaactaggtgggcgcatttcaaaaattcggatgggaaaaagcctggaaattccagtgaatattcagcaaggccctctttcattgtacagggatcaaatttcctcctcttttttgtgccccctcccacttctacaagttatcccctgtggggaaaacaggatgataatcaaaactctgggctgatgtttttccaacttagtgtctattggaatcaatcttaaatcagaagctttttcagaaaaataatatttaggccagaattagagttgagtgtattttttaaaaatgattaaggcttggttgtgagaaatattacctgtaccagctgggaaaaataatgtcatcactaactaaaagataattaatttgagagaaagtgttaagagagggagagtaaggaagagaacagttaagaggaggcagaggtgagggcagtagtaaaaatctctaaaattttaatttacagccaaaattcttcatgtgtaaatttgtattgattcagatgcagaaatgaaaaaaaaacacctttgttttataaatatcaaagtacatgcttaaagccaagtttttatctagtttattctagtacttagcttgcctggaata

SEQ ID NO: 863 - DNA, 268 bp, Homo sapiens
  source 1..268: mol_type = genomic DNA
tggaaaaaatccttagccagggctcagagatgaagcagtgaaagagacaggaattgggagggaaagggagaatggtgtaccctttatttcttctgaaatcacactgatgacatcagttgtttaaacggggtattgtcctttccccccttgaggttcccttgtgagccttgaatcaaccaatctagtctgcagtagtgtggactagaacaacccaaatagcatctagaaagccatgagtttgaaagggcccatcacaggcactttccta

SEQ ID NO: 864 - DNA, 165 bp, Homo sapiens
  source 1..165: mol_type = genomic DNA
tatcatgccaactactgcgagggtgagtgcccgagccatatagcaggcacgtccgggtcctcactgtccttccactcaacagtcatcaaccactaccgcatgcggggccatagcccctttgccaacctcaaatcgtgctgtgtgcccaccaagctgagacccatg

SEQ ID NO: 865 - DNA, 31 bp, Homo sapiens
  source 1..31: mol_type = genomic DNA
ggaaaaggagcagtcgcacagacctttcctc

SEQ ID NO: 866 - DNA, 32 bp, Homo sapiens
  source 1..32: mol_type = genomic DNA
gtgagcagtgccaggagagtggcgccagcttg

SEQ ID NO: 867 - DNA, 113 bp, Homo sapiens
  source 1..113: mol_type = genomic DNA
ttgctctctgaaaaagtagtagacgctcggaagagcacctggcatgtcttccctgtctccagcagcatccagcggttgctggaccagggcaagagctccctggacgttcggat

SEQ ID NO: 868 - DNA, 171 bp, Homo sapiens
  source 1..171: mol_type = genomic DNA
agacgctgcacttcgagatttccaaggaaggcagtgacctgtcagtggtggagcgtgcagaagtctggctcttcctaaaagtccccaaggccaacaggaccaggaccaaagtcaccatccgcctcttccagcagcagaagcacccgcagggcagcttggacacaggggaag

SEQ ID NO: 869 - DNA, 83 bp, Homo sapiens
  source 1..83: mol_type = genomic DNA
ggctgtcatttgttgacccctattcaagagggtctgtcacagaagactcctgcttgcctgaaatttacgagtgcatgtaaatg

SEQ ID NO: 870 - DNA, 292 bp, Homo sapiens
  source 1..292: mol_type = genomic DNA
ctggaactgagtggttgctaaattcaactgccctgacaatgtggggatttcctgtccattagcagcgattgctatttgacatatgtttctggtgcccattaatctgccctgtaatgggtcagaggcaaaaatgggggattcagaggtactaggtggctctcttaatttaatagaactcaatgctaaggacgcctctatttgttaataagtaatcaagtcattggctactttctgctaaacactagactatgatagtgaccttagaccccgggcattctaaaccaggctggca

SEQ ID NO: 871 - DNA, 65 bp, Homo sapiens
  source 1..65: mol_type = genomic DNA
cagatttgtgcatgggatacatgtacagcagacagttgtaaggaggtccacggtcatggaaaaga

SEQ ID NO: 872 - DNA, 58 bp, Homo sapiens
  source 1..58: mol_type = genomic DNA
gctggatttccgttaactatagaaatccaggcagggagatcctcccagggagttgcaa

SEQ ID NO: 873 - DNA, 30 bp, Homo sapiens
  source 1..30: mol_type = genomic DNA
agaacttgaaactgtgcctaaaatttatag

SEQ ID NO: 874 - DNA, 86 bp, Homo sapiens
  source 1..86: mol_type = genomic DNA
gcccttgcctcagtgaatttaccactatcataatcacagtgtgcagagtgtgttaaattaagaacagaatccacagtacgcaatgc

SEQ ID NO: 875 - DNA, 34 bp, Homo sapiens
  source 1..34: mol_type = genomic DNA
atgaggtcggagtcagaggaactccccttaccac

SEQ ID NO: 876 - DNA, 302 bp, Homo sapiens
  source 1..302: mol_type = genomic DNA
ctccaggctagttatccaaggcttgggaggtttccctcggccttctcctaaggccttggcaggaccctgccaccctaaaatcaactgctgattgcctttttagatttaaatgattaagctctgcttatgggaatcttcttctcttttattttgttaagaaacaaacaacaacaacaaaacccacaccaattcttagcaaaggggaatatcgaattcagattttgaaaaaataagtcatcatgcttcctaaaataagacagcttctccctctaactgctctctctgctctggtattctatcta

SEQ ID NO: 877 - DNA, 254 bp, Homo sapiens
  source 1..254: mol_type = genomic DNA
aggatgtacccaactctcagccagagatggtggaggccgtcaagaagcacattttaaacatgctgcacttgaagaagagacccgatgtcacccagccggtacccaaggcggcgcttctgaacgcgatcagaaagcttcatgtgggcaaagtcggggagaacgggtatgtggagatagaggatgacattggaaggagggcagaaatgaatgaacttatggagcagacctcggagatcatcacgtttgccgagtca

SEQ ID NO: 878 - DNA, 38 bp, Homo sapiens
  source 1..38: mol_type = genomic DNA
tgctttggctgagaggatttctgttggcaagttgctgg

SEQ ID NO: 879 - DNA, 79 bp, Homo sapiens
  source 1..79: mol_type = genomic DNA
cacacaaaaaaacctgcgcgtgaggggggaggaaaagcagggccttttaaaaaggcaatcacaacaacttttgctgcca

SEQ ID NO: 880 - DNA, 54 bp, Homo sapiens
  source 1..54: mol_type = genomic DNA
ccttctctcttactcggagacagtcagaactctcctccctgacagccacaaacc

SEQ ID NO: 881 - DNA, 70 bp, Homo sapiens
  source 1..70: mol_type = genomic DNA
gtgccaataccatgaagaggagctcagacagctcttaccacatgatacaagagccggctggtggaagagt

SEQ ID NO: 882 - DNA, 362 bp, Homo sapiens
  source 1..362: mol_type = genomic DNA
ttggggcatcttgaaagtgtcactgcagtatagcaatctctctcaggtaatatagagataaagggaatataataaattgacctgttatttattatctttttcatacctaggacattccgaggcttaatatatttctgaagcctacagccctgataaacatcaatcccacgtcagtttccagcagtctcatctccccacacccttctgcaatgaaagctaatgtaaaagaaagaaatatgcactgcttaataagtcagaatacaatagaacttgtaaaatgtacctgcatataaggtagacattaggaagacttgaatctctctcttccccctgttctcctgagcattatggcaacagcattt

SEQ ID NO: 883 - DNA, 176 bp, Homo sapiens
  source 1..176: mol_type = genomic DNA
atgcctttaggggttacacgctctcttccgtgaataatggggaagagcggccacaagagggcgcgttccaaagacttttgctccttgtcagtgtatccagggaaaggcagttgcgcgtactggaagcccctgtctgtagcgccctaatcttggtgattatcagttaccgcctgctc

SEQ ID NO: 884 - DNA, 174 bp, Homo sapiens
  source 1..174: mol_type = genomic DNA
gagggttgcttcctgtctttgtataccaacctccacacatgatggattcaatgacagctcgtatccagttgcctttaaccatgtcatatgactaagtatacctatgcctttgaccacttttaaccgcactaccgttactagcaatatgcccctctttctgacttactggacttg

SEQ ID NO: 885 - DNA, 104 bp, Homo sapiens
  source 1..104: mol_type = genomic DNA
accagggcatctttccgggggtgcagatagcctgctggctgtgtggcttccccttgcaggagaagccctggtgtcctacaagcttcccagtttggctctctcac

SEQ ID NO: 886 - DNA, 110 bp, Homo sapiens
  source 1..110: mol_type = genomic DNA
agtgacagtcatttttacctttagaaaatgtctataagtgcacaggcaccacattcaagacagggaagagctactttgggggacagttgtcattgaaccagcagttactt

SEQ ID NO: 887 - DNA, 44 bp, Homo sapiens
  source 1..44: mol_type = genomic DNA
agccggaggaaagccgcggcattttcgggtgctaggggagcaga

SEQ ID NO: 888 - DNA, 131 bp, Homo sapiens
  source 1..131: mol_type = genomic DNA
attaggtgatggtagcggactagccgacggagggcaggcaggggagggggagaggactttacagaaaaggaattctcggtcgagctctgcctggagatgactggcttacacttactaaacccagcgggtca

SEQ ID NO: 889 - DNA, 265 bp, Homo sapiens
  source 1..265: mol_type = genomic DNA
attgatgtttctggagctgaaaccccaaaggtgttaggttacttgtaacagaaaaagtcttacaaatagttgttttggaaaaggggacagtatatataattcagaaagcattgttaacctgtgcaaactgtaattataacttagtgtcacaattttcttgccctcttccccttgcactcagatcttatcttgtagtaatgatatttattaactctttccacctaaactgcattgcttgactgtaatgctatgaacacactaggtg

SEQ ID NO: 890 - DNA, 131 bp, Homo sapiens
  source 1..131: mol_type = genomic DNA
cacagtcaatggatccacaaggcctgaggagcagtgtggggggacagacaggaggtggatttggagaccgaagactgggatgcctgtcttgagtagacttggacccaaaaaatcatctcaccttgagccca

SEQ ID NO: 891 - DNA, 31 bp, Homo sapiens
  source 1..31: mol_type = genomic DNA
agcccctcgtggtgccctgggaggccagcta

SEQ ID NO: 892 - DNA, 38 bp, Homo sapiens
  source 1..38: mol_type = genomic DNA
tcttcacaatggaaatggcacttaccagtcctgggtgg

SEQ ID NO: 893 - DNA, 106 bp, Homo sapiens
  source 1..106: mol_type = genomic DNA
ggcaagagggaaagcgtcagccttccctgatattctggaaagtctcccggggctgggggtgggcaggtacagagcttcgagctctgctgatcgctgacatccaggg

SEQ ID NO: 894 - DNA, 377 bp, Homo sapiens
  source 1..377: mol_type = genomic DNA
agggtaacactgtctgtaagaggcagagctgggactcaaattccagatttcagattccaaatcccatcgttttttatctctacaatgatgcctcccatctgggtggtggagagaagggaggcgtgtaaaatgtcagccccagaaggacaagagcaagccagtgtgagcggaattgatggctgcaagctgagacttggattggagacgtagtgagactcaggattgtgcagtgctgcagggaagtggttgctggatagaggcatgggctgaaccaagcagctggactgagactgggggacagaactccaaagcccactgagatgtgggaaaacatggagaagcacacggagcattcacaacttattgccgtcagagtc

SEQ ID NO: 895 - DNA, 186 bp, Homo sapiens
  source 1..186: mol_type = genomic DNA
gagcccagaataaaagacgatctcaggctaggagctcaggcaacatcttagtccggtctcatctgttcctggatgtccctcagacccccagctttcatcttttaggatttattccttccctgggataatataatttgtggtccaaaaagaacatcatcaaaatttcaggcagaatgggccaggaag

SEQ ID NO: 896 - DNA, 38 bp, Homo sapiens
  source 1..38: mol_type = genomic DNA
ccagtctacgtgcagcgggccaaggcttacctggagga

SEQ ID NO: 897 - DNA, 49 bp, Homo sapiens
  source 1..49: mol_type = genomic DNA
tgagatcgagaataacagaagcagcggagcattctggaaatattactat

SEQ ID NO: 898 - DNA, 299 bp, Homo sapiens
  source 1..299: mol_type = genomic DNA
gatttcgccatatcaccctggctggtctggaacccctgggctcaagcgatccactcgcttcagcttctcaaagtgctgggattacaggcatgagccacagcgcccaggctgtagctctcttaaggaggaacatatctcatctgagacaaacctgaaatgccaaaccaaactgagttagcccctctctgtctgttgtatatattggagtaataacctatttgtcttgataaagggattgcatgcttgaattgcaaaaacctttatttcttttgggttgcccaatgtgcaagactaagagt

SEQ ID NO: 899 - DNA, 47 bp, Homo sapiens
  source 1..47: mol_type = genomic DNA
catacgatgcagacccaggaagggccacctgcgctatggtcagagga

SEQ ID NO: 900 - DNA, 35 bp, Homo sapiens
  source 1..35: mol_type = genomic DNA
ggagaccctgaaagacatcgtggagtattacaacg

SEQ ID NO: 901 - DNA, 103 bp, Homo sapiens
  source 1..103: mol_type = genomic DNA
acactgggctgtccaagcatgttgaagacgtccccgcgtttcaggcccttggctcactcaatgacctccagttctttagatacaacagtaaagacaggaagtc

SEQ ID NO: 902 - DNA, 41 bp, Homo sapiens
  source 1..41: mol_type = genomic DNA
tgctgcttctgggtcctgctgtcccccaggagaaccaagat

SEQ ID NO: 903 - DNA, 80 bp, Homo sapiens
  source 1..80: mol_type = genomic DNA
cccgtcctggcactcccattggcctgtagattcacctcccctgggcagggccccaggacccaggataatatctgtgcctc

SEQ ID NO: 904 - DNA, 26 bp, Homo sapiens
  source 1..26: mol_type = genomic DNA
gagtctgtcacagtttctttgtgtaa

SEQ ID NO: 905 - DNA, 971 bp, Homo sapiens
  source 1..971: mol_type = genomic DNA
gccggtgttatttactagattcttccctttgaactcacagactcaagagacagaccaagagttcttatatactcaccacagcggaccaatccaagtggcatttttaggaaaggttgcagcatttaatgccatgtggtatgtctgttcgtcaagtgggtggcaagggaatatccaagctggcattttggatatgatgggccttttactttcctgagtgacatgccacatgtcaagaaatactgctccccacccccccactcccatcacatttacgtgaacaattttcatttagttatttcccgttccatatggtgttaaaacagtcgtattaaataaagattatttctagttttcagtggtaatttaaatgagaggatatgtaataattgcttattagatacttatccaaatgaaatataacagagtttacagtacttaaaatggctggttatggtcttggaaatgtttgaaaattcattatcctgaaaaaaactttaccattctgttttacccttgaggtattttttggggaaaaatgtttttgataactattaatctaaatatagtataattataggcaaatttcactgcctagttttattgatatcctgagtctacagctagtccattcgtatgactgattgatttatgatagctccagagaaccataaatttcaaaggctaaactctctgattttagtaaatagtaggtaaagtgacacaatatatgtttacacaacactgttttcatgaaatgcaaactttgcaaaactcacattaactgggaagcagccaaccctctgtagagaaatcccagattgggagtctggtttgaatctttgaagacagaaaggtgatatccggcctgctgttttaaagggaccacacttttgaatacctactggtgtttggcagaaatctgagactggcaccagacacaaattttagacatgggtatcttccctccagta

SEQ ID NO: 906 - DNA, 844 bp, Homo sapiens
  source 1..844: mol_type = genomic DNA
tgctttgacagccaccctatacatggtacatttagatgaaatgggaaccagatcctaaatttttcaaatgtcattgccaatttatgtgtataattccatcacttcctgatgagtaagtctatttttgttctatatacatcataagttagtatatattcttatttacagaaacatgctcaaatcacattcagaaagaacaaaaagtcatgggaaattttttattttacaacaaagccctgctttctttctggacgtattttacatcattagagagactatctgcacatacatctaccataatctttttccttctttgccaactgttcagtgcacatgtgctgcatcagaaatggcacctggatgacagaagctcaaagagtcacatatgtctctaaaatagagttcttttcctcttgggctgtctgaactggtgtaaatagaagctcagttgatcttggttttaattaacttattactctattaatataaccttggaattctattctaattatgttgttctggctgcttgtagtatcagttcgcccctcttgttagggagatatgtaacaatctgtcatttaattgagcagtctttttcacataacagtaatagcaaaaatcctacctactcagaatcatcttcttaggttgtctcctaaatctgaacaatacagttgttttataaaattacattttgtctcttgagatttaatcaattagaactctttagggagaaaataaataatagaagaaaatatatgcctcatatttcatatgtaattatctgttgatataatttttcaatgtattttgtatttgtgggagcataatgacctgtacattc

SEQ ID NO: 907 - DNA, 35 bp, Homo sapiens
  source 1..35: mol_type = genomic DNA
ctcaccacggatgttgaccctgatctggaccaaga

SEQ ID NO: 908 - DNA, 51 bp, Homo sapiens
  source 1..51: mol_type = genomic DNA
gaagttggccttgtacttgcagctatattggcactactactggctttctat

SEQ ID NO: 909 - DNA, 117 bp, Homo sapiens
  source 1..117: mol_type = genomic DNA
gccaaggtattactaccaagctgtaacagctgttgaactgccagatgatatatttggttgtcttccagaatttgctattatgatcacgaaacactgccttcttttcgctcctgattg

SEQ ID NO: 910 - DNA, 26 bp, Homo sapiens
  source 1..26: mol_type = genomic DNA
tttacgagcaaccaaattaaaagcag

SEQ ID NO: 911 - DNA, 136 bp, Homo sapiens
  source 1..136: mol_type = genomic DNA
aaaggaggcattacaagtgatatttcagaaataaaaaatacaagctactttgggtaactgaatgccaataaattagttaacctagaggaaatggataaattcctagactcatacaactcactaagattgaaccatg

SEQ ID NO: 912 - DNA, 358 bp, Homo sapiens
  source 1..358: mol_type = genomic DNA
acctgatgagcaaaatggctgaacagaatcctctagcgatcatccccccacaggaacaccaaactgaacaactattcacacaaaacaagcaccttcataagaagcaaaaaacaggtgaaccggtacctggctttaacatcgtattaaggaaagaggcactgaagaggatttgaaagacaatcttgagtcacctataccacccctttcccgtacttcacctttggccatgtggtgttaagagacaatctgtgcacttgcatgagggagagtgcagtgattgtgggaatttgccttggaactcagtgctgccctgtcacagtggaaagccacacagggaagaacttagctggtgcccaca

SEQ ID NO: 913 - DNA, 216 bp, Homo sapiens
  source 1..216: mol_type = genomic DNA
cctcctaactatgcatgtacctttcacattttattgcaaaactattaggctataataagaacatgcatcaagcagggacaccaatatcttgcctggcatttaattatcaaaaacacctgtgctacaatagtatattcacgtgtataattctttatatgtagacatttaagtgcttgaattatttaaaaaatctactgtctggataaaacttccata

SEQ ID NO: 914 - DNA, 39 bp, Homo sapiens
  source 1..39: mol_type = genomic DNA
gctactataaaacttcctgttgatcagtacagaaaacaa

SEQ ID NO: 915 - DNA, 228 bp, Homo sapiens
  source 1..228: mol_type = genomic DNA
ttgcttgtgacatgactagttcttgtctgacttcatcttcatcttgtaatgccttactagaaggaatgaggaacaacttgcagacaccagtttgaagaatacttacgactgtaacattgtattctatgaataatgacatattgtaattgaggctaggaaatagagtctgtgctaggaagaaaaggagaatatgaatgtggtaatcaggttgtactctctgctgcaata

SEQ ID NO: 916 - DNA, 140 bp, Homo sapiens
  source 1..140: mol_type = genomic DNA
aaacaagttggttggatagctgtcctccatgcagtcattcatgatccaggctgtcatcatcttcatcactcatgttcagagttaccctagaggtcatctccatttcatccagataaatgagtatgcaaggaacgttttta

SEQ ID NO: 917 - DNA, 223 bp, Homo sapiens
  source 1..223: mol_type = genomic DNA
ctgctgggatgttggcttaaatgactagaaaggaattgggggaagcataatgagtaaccattttggcagatagcctcagtgatttgctttaagaaaaaattaagcatagtctgtaaaggcaaaaaacaaaactaaattgaaaagggaataatatcttgagtgtttattcatttaatccaacttctctcctaaaatggagtggtatcttccctagccacacaca

SEQ ID NO: 918 - DNA, 133 bp, Homo sapiens
  source 1..133: mol_type = genomic DNA
gctaatgtctccctggatttcttgggagtttgctatctaaccatcaaagcaatagaaatgaatgatgattactgcaaggctttgaagaacaaagaaaagtcagaacattttaaaggttctacatgtctgagtc

SEQ ID NO: 919 - DNA, 68 bp, Homo sapiens
  source 1..68: mol_type = genomic DNA
atggggactcctccatttaccaaggctacagctgactcctggagaggcctgagtactcattgcagttt

SEQ ID NO: 920 - DNA, 33 bp, Homo sapiens
  source 1..33: mol_type = genomic DNA
ccttttgtttgattaagctcttagcgtgcagtg

SEQ ID NO: 921 - DNA, 62 bp, Homo sapiens
  source 1..62: mol_type = genomic DNA
cagtctgaaggtttgtcgggtaatagtcaagtggatatgaaactgccctttgtgaacctcag

SEQ ID NO: 922 - DNA, 37 bp, Homo sapiens
  source 1..37: mol_type = genomic DNA
gggaagcaacgtcaatcagtggtactggaaaatgagt

SEQ ID NO: 923 - DNA, 194 bp, Homo sapiens
  source 1..194: mol_type = genomic DNA
ttggtgtttgcctcatttgagcctggtttgaacagttggccacctttggccaaaactcagtgattggcacaaaagtcggttgcagtctgtttacacatggaaaggttacagtttactgtgcacagagaaaccattaggtcacatttagaatatataaggaggcagcattgggctaaacttgacaattgcttatt

SEQ ID NO: 924 - DNA, 362 bp, Homo sapiens
  source 1..362: mol_type = genomic DNA
cgattagagattaagttgccagctttaaaaatggggactagtgtgtaagccttttgtatgtacatatgtacatgcactaagtatgtaaatacatacatattgtgagactaggttctcacagtaaatatctgataaaaatccctgggggaggggaaaaggaaccattttgaaatacaccacagcactctgttcttaaaaaggtctctcctcaagagaaactagtgtatataaaaaacttactttctaaatgtaactgttactctactaatccagagtttcaaacatgtgtgaacaataagatagcatacataatttggcattttaaaagttatccaaagatacttttgtagaagccacttagc

SEQ ID NO: 925 - DNA, 688 bp, Homo sapiens
  source 1..688: mol_type = genomic DNA
ttttctggcaatgaacctgggttccaagcataggtttttcttatggaaggcagttttacaataaggaaatgtttttacttgtatttattttgtgatatttcagcaaatccaaataaatgtagtaacatttataaagctatacatttataactgatttatttgttaaatatttagtattatcaattgtctgttaaagatttgttgctacattaaatgcttggtctgtcttgatgttcagtacattattatactttggtatattgcaatattttgataattatgtattggttttagtcactgttcctgcatattaagtaataaacagattaatatcatcataaaatatcatttactcagcaatatttcttagtaaattgatacatccatttttcttatgtattgtggagagaggaaatatgacataaaatggaagaatatgggcctctgtttatctctgacctcatcgcttactgttctttcccactcctcactctactcaaagcctttaaatagctctccattttactcaacatcaaatctaaataaagctcttaaactggtctaaatgtctctacagtacttgaacctttgttatttctctaatttcatcttcaactctgctcatcgttattctcttgccctgggcatactgcctccctttttgttctctgaacgtgccaggcatttt

SEQ ID NO: 926 - DNA, 99 bp, Homo sapiens
  source 1..99: mol_type = genomic DNA
caggaatgcaagcactgctacctaactaaagaccttggctttggaaacatcttaccccttggcagctctccagagtttagacttggcagcatcaaagac

SEQ ID NO: 927 - DNA, 141 bp, Homo sapiens
  source 1..141: mol_type = genomic DNA
tcttccaacgtcaaagccagcaacattgcagcaatctgacttattttgttgtcatgtctcctgaccacatctggaagggttatctacttttgaagacacatccagataattcaggacaatctgtccattttgaggttcttc

SEQ ID NO: 928 - DNA, 252 bp, Homo sapiens
  source 1..252: mol_type = genomic DNA
ggagcttggtgtattcctgaatccatcagatgttggtgtccgcgtggatgactaggaaaaggggattggagattaggtttcttctacttggagttctctgctgcttgtttgagcttaataagcctcctgaagaagttgaagcaatttattgctagaggagccccaatgtataatctccctttcattctctactgtggagaggtgtgctaaacctgtagagctgtttttgcttcactcggctcatacttaatg

SEQ ID NO: 929 - DNA, 129 bp, Homo sapiens
  source 1..129: mol_type = genomic DNA
ccgggaatgaaagcgggcgcacctctttagcgagccctaaagcgtttgggagacgatcgttccgtccctgggagcggcacttggtggggctgggcggagggaggctctgcaagagaaacccggagtccg

SEQ ID NO: 930 - DNA, 71 bp, Homo sapiens
  source 1..71: mol_type = genomic DNA
cctgagtgacagaaccgtggacagcaacatttcccacaggacacgaagtttgtcggcccttgccttggcag

SEQ ID NO: 931 - DNA, 81 bp, Homo sapiens
  source 1..81: mol_type = genomic DNA
gatgtccagcagctagtagatgtagaagtgctgtttgttactgggtatgtccttgctgtcagggaagtgcacctgtttcag

SEQ ID NO: 932 - DNA, 106 bp, Homo sapiens
  source 1..106: mol_type = genomic DNA
gctaaaactggtaaggtgcccatgggttccatggaacctccacatccatttacaaagccctctaggaagactgggctagttgctttcttcagcttcagtattatgg

SEQ ID NO: 933 - DNA, 58 bp, Homo sapiens
  source 1..58: mol_type = genomic DNA
atacaccttaagcaaccaggtatccttgattgtgggagttccttggaacatgagcaga

SEQ ID NO: 934 - DNA, 152 bp, Homo sapiens
  source 1..152: mol_type = genomic DNA
taacctggactttcataaaactggcatatcttctgttttacatggaaaattattttatcttaagtttccatttagttgattaaaaatagggttatgaatgttaaataagtgatgatttattgcaaaggaaatatgtttcgaaaggtcgaata

SEQ ID NO: 935 - DNA, 139 bp, Homo sapiens
  source 1..139: mol_type = genomic DNA
gagtcccctggtctttacatattaaaaatattaggctgtcctggaaatgttgtcttatttgtctgacttcaccactaaagtatgagtcccttaaggttgtcatttcatttttgtagtccttatgcctaaaatagcaaca

SEQ ID NO: 936 - DNA, 150 bp, Homo sapiens
  source 1..150: mol_type = genomic DNA
tatcctgctggtgagtttgggaaaaggaattggatcggggcatgcagcgtctccttatctgcaaacaggcctgccggtgggaatcatggtactgttccccagcaacacaacattaatttcagagggagatgctctgccactacaggagtg

SEQ ID NO: 937 - DNA, 357 bp, Homo sapiens
  source 1..357: mol_type = genomic DNA
tgacaccgccatgaaaacgatcagcaccgtcgaatcctcacgccccactcaagttccttgattgcttcaataatgtcctccgtagcaaaaggatctagttcaaaatcgggagttacatttcattgtcatgcctaaaacgtaagaattgctcattcactttggagcagttcttcagtctatccttgattttcatgaccttgacacttttgaacattatagaccagttattcaatagaatatctttcaatctgggtttgtccgatacctctttattattagattgaaatgatacattttggtggaactatcacagaattgacattgcattcttctcattacatcctgtctggtggcctg

SEQ ID NO: 938 - DNA, 206 bp, Homo sapiens
  source 1..206: mol_type = genomic DNA
aaaggaatcctagtgacgagttgtcttgaaagagaagaaaaaaagttaaaaaacagaagaaaaaggagatctttaaccgtgctgggtataaaattctaagtcaggatacttttcttcctttgagcatctttgactgcctggggaatatcagacattcttttagtggccttgtgatcattttgctgagcttgttcatattcctgttc

SEQ ID NO: 939 - DNA, 181 bp, Homo sapiens
  source 1..181: mol_type = genomic DNA
gcatcaaactgaaccgcgacttgtccaaagtcacatagtaagtggaggtggaactgggctttaaatccaagcctacatacagactagagttcacacttttaggcttggcataaactgcctataaactataaaaaagtaaaactccataaaatctcaggtacttggactaccttcagtctga

SEQ ID NO: 940 - DNA, 135 bp, Homo sapiens
  source 1..135: mol_type = genomic DNA
agtatgggtgactattctttacaaatccatttgtgatgcagtggtaatttggtggcactgcaattatggccagcaatgaagattataaaataattgcctgaggaaccaagctcatgtgcactaaaaagaagcagg

SEQ ID NO: 941 - DNA, 30 bp, Homo sapiens
  source 1..30: mol_type = genomic DNA
ctgcacttggccctacaccgatgaattttt

SEQ ID NO: 942 - DNA, 311 bp, Homo sapiens
  source 1..311: mol_type = genomic DNA
tgctgagccgacataagaatcttttatgaaaaatgtactgttaagttcagggggtctattggttttatgtaaaaggcacaagacaattcctgtagtgcattttatgagttaaggtttccatacggattattgaaacaatttgttacatgtatttgttacatgatcttaatatttcatgtacaagactgacacccatccacttttgaagataagccagtttatggggtttttttttttgcgggtagaggttgggtctccctattttgtccaggctggtctcgaattcctgggctcaagcataagcataaggc

SEQ ID NO: 943 - DNA, 214 bp, Homo sapiens
  source 1..214: mol_type = genomic DNA
ccttatgtaccgagcaaatgccaggtctagcaaacataatgctagtcctagattacttattgatttaaaaacaaaaaaacacaaaaaaatagtaaaatataaaaacaaattaatgttttatagaccctgggaaaaagaattttcagcaaagtacaaaaatttaaagcattcctttctttaattttgtaattctttactgtggaatagctcagaa

SEQ ID NO: 944 - DNA, 77 bp, Homo sapiens
  source 1..77: mol_type = genomic DNA
tgatcagggaccatgaaaagaaacttgtgcttcaccgaagaaaaatatctaaacatcgaaaaacttaaatattatgg

SEQ ID NO: 945 - DNA, 519 bp, Homo sapiens
  source 1..519: mol_type = genomic DNA
caacctggagtgcattgacgcgatctcggctcactgcaacctccacctcccaggttcaagcaattctcctgcctcggcctcccgagcagctgggattaacaggcccatgcctgccaccgtgcccagctaatttttgtatttttactagacttggggttttgccatgttggccaggctggtctggaacttctgacctcaagtgatccgcccacctcggcctcccaaagtcttgaaattacaggcgtgagccactgcgccctgccagattttgtatagtaatatatatataaaatgacctgtcacaggttggctttcatagttttacctttcctttttgggtggtgcccttgggtctctactactgtctttcatcactcccaagaaattgagtagtgcagccaggatcaggaccagggattggcaaatgttttttgtaaagggccagataggaaatattttgggctttgaggactgtgttatctctgaaatgatcttgttccagtgttaccatgtcaagac

SEQ ID NO: 946 - DNA, 87 bp, Homo sapiens
  source 1..87: mol_type = genomic DNA
atgaagctgtagctgtactacaagcccaccaagctaaagaggctgcccagaaagcagttaacagtgccaccggtgttccaactgttt

SEQ ID NO: 947 - DNA, 254 bp, Homo sapiens
  source 1..254: mol_type = genomic DNA
gtacagttgtaaagtctgcataataacctgtggcgctatttatccccattttatagataggtaaactgaaacaggctgaataatttgccaaatgctcacacagctcttaagtggcagagcctggcttcaaatcccatcagctccaacagccatactctcaactgctgctgctttctctagtggagaaagagaaatatttttcgagtgtggggaggacaaggaaagagtagtgcaggggagcgattcataattct

SEQ ID NO: 948 - DNA, 25 bp, Homo sapiens
  source 1..25: mol_type = genomic DNA
gccatgcaccctactcttgctggta

SEQ ID NO: 949 - DNA, 25 bp, Homo sapiens
  source 1..25: mol_type = genomic DNA
tcctcaagagcaaaagcaaatgttg

SEQ ID NO: 950 - DNA, 25 bp, Homo sapiens
  source 1..25: mol_type = genomic DNA
aatgggtccacgtcctgcagctgca

SEQ ID NO: 951 - DNA, 67 bp, Homo sapiens
  source 1..67: mol_type = genomic DNA
tgcaaacctcagatcgaagaagacagcataaacacttttcactcagtaagttttcccagttaatgta

SEQ ID NO: 952 - DNA, 36 bp, Homo sapiens
  source 1..36: mol_type = genomic DNA
tcaggtatatttataagtgtgggcggcaaaccaccc

SEQ ID NO: 953 - DNA, 25 bp, Homo sapiens
  source 1..25: mol_type = genomic DNA
aaccgtgctgcatactatcctccta

SEQ ID NO: 954 - DNA, 36 bp, Homo sapiens
  source 1..36: mol_type = genomic DNA
caaccagaaccatgaaggttttcgtatttggtcatt

SEQ ID NO: 955 - DNA, 26 bp, Homo sapiens
  source 1..26: mol_type = genomic DNA
ttatgatggagggtggtcgcagcaaa

SEQ ID NO: 956 - DNA, 145 bp, Homo sapiens
  source 1..145: mol_type = genomic DNA
ctgacctggctagggtaatgcatatgtgtagtttgcccttaataattgggtattaaggaaaaattgtgaactcaatgggtaaatacaagatgattaagcattaacagggtttagttatttgattcagtgatttataattgtctaa

SEQ ID NO: 957 - DNA, 271 bp, Homo sapiens
  source 1..271: mol_type = genomic DNA
ggagtacgatagaatttattcctgaatgtttttgtcttcagtgtgttccctggatattgtttaaattgagtgttgtgcatcagcatattttgaatgtatgaagcatgcatgtttttctgtttcttgagacaggatctcattatgttgcccaggttggagtgcaggggcatgccacaatcacagctcactgcagcctcagcctttcctgggcttaagccaagcttgtccaacccgctgcttgcaggccacatgcggcccaagaatgctttta

SEQ ID NO: 958 - DNA, 46 bp, Homo sapiens
  source 1..46: mol_type = genomic DNA
gatgatggtattgatgatgaacgtctccggaaagagttttctccat

SEQ ID NO: 959 - DNA, 89 bp, Homo sapiens
  source 1..89: mol_type = genomic DNA
ttatgttggtcgagctcagaaaaaggtggaacggcagacggaacttaagcgcaaatttgaacagatgaaacaagataggatcaccagat

SEQ ID NO: 960 - DNA, 429 bp, Homo sapiens
  source 1..429: mol_type = genomic DNA
tgccttggcccatacatcttctaaatttctgtaatcaaatgtgatttttaaccttttctgccccacttgcctgagataccacccgcctcagttacctgtctctcctactttagagggagttaggggaaaacatgtcttcagaaataaatgcttcctcttccaggtagttcacctgtgtctttaaaaagaattttttttccctgtctttcaaattcctgtattacctatgtcttaccaaagagtccaactatgtattccttccactcctgttgaaagtcgggtaggccaaggcttaataaatacttgtttcttaattgatacaaagaaaatcaaattggtcttagcacaatagctcatgcctgtaaccctagcgcttggggaggtcaaagagggaagatacttgaagccacaagttttagactagcccgg

SEQ ID NO: 961 - DNA, 73 bp, Homo sapiens
  source 1..73: mol_type = genomic DNA
tttgttggacgatttaagtctcgtaaagaacgagaagctgaacttggagctagggcaaaagaattcaccaatg

SEQ ID NO: 962 - DNA, 191 bp, Homo sapiens
  source 1..191: mol_type = genomic DNA
ttagagtacacgattgggaagtttaaatttttattctaggagatggcaaagaaagcgcaagcgccactttaaaatgacgatgaaagctttttaatttgatagaggtctttttattggcatggtacacatgcacttccactcatttgtattgatgggagtgatccctttaaccctaggttagctagagaaga

SEQ ID NO: 963 - DNA, 228 bp, Homo sapiens
  source 1..228: mol_type = genomic DNA
gttataaatatctagctaatcatattttgaatcttatttttaataattccaaatccattcattttaagttaatatttgtcagggagaagttagatgcacataagataaaagaataaaaacattttaaagatgaataacaaaaattcatgtagttgtactggagtgaaaattaataagctaatcttgatttttacaattgaattttctacacagtaagtgtaacataca

SEQ ID NO: 964 - DNA, 57 bp, Homo sapiens
  source 1..57: mol_type = genomic DNA
tgaaaatggttccaagggctatggatttgtacactttgagacgcaggaagcagctga

SEQ ID NO: 965 - DNA, 100 bp, Homo sapiens
  source 1..100: mol_type = genomic DNA
gctacatttagtttagtgcttgaaataggaactgtgcagtaatggatatctttatttcacaaatatccaggttagatggctaacagattgtctctcaaca

SEQ ID NO: 966 - DNA, 29 bp, Homo sapiens
  source 1..29: mol_type = genomic DNA
ggagcgtgctttggacaccatgaattttg

SEQ ID NO: 967 - DNA, 143 bp, Homo sapiens
  source 1..143: mol_type = genomic DNA
tttaggaaatggactagttttcatataatattgttagttattagcaatgaaatgaccaattttagcaagtagttgggaagaagttaaaatatttaaatctataaactacttccagcttgtagataaatctgttgcgtaatgtc

SEQ ID NO: 968 - DNA, 606 bp, Homo sapiens
  source 1..606: mol_type = genomic DNA
aggcaggatgtatcaatgcatgtcagatgggggtagataactttggggcaggttatcacaacctaagagttggtggagaaaacatgggaatgaattctagagaccacaaaatgaaaacttgaaagtgttactctttctcagcttaacgtttttaaatccaaaaaacaatttttacatttcttgggattcgaagagttgaacttcaggttgccgtggttacagtgtacagtatatattatcagtctgtaccagtagaccagtaccctaactactgaaaagaatatggcagttttccatttgtctagtttctgtatgtacaatttactatccaattaattacttaagtggatttcttgttcttttttaaaaacttattgctacattgataggcagaatagcttctgaaagtgaccagttttcaatttcataggaagaggtgactcattgaaaaatagctcaagcaaagtcagctaaaaaaaaaaaaaaactagggaagctgagtaggtgtggtcaattgataatgagctaacagctgattatcactatattctagaaactggaactttcatttataaaaaaagaggtggccggaaaattcatcctgtc

SEQ ID NO: 969 - DNA, 281 bp, Homo sapiens
  source 1..281: mol_type = genomic DNA
tgtggcagccgaccactttgaaggccagttttctcaggcaacttagaccatttttagtcaaattttatcttagattcacagtactggtggttttcgagtatattatgttaccttctgaaatagttcctgtcgttttgaggggcttttctttataaaatagtcaactttggctataaaatgttactttagtgtaattccaactggaccagtcttatctgtagcatgcaagaagttcaagtttctcttttatttttaaaagtggcccatgatacctgtaaatc

SEQ ID NO: 970 - DNA, 104 bp, Homo sapiens
  source 1..104: mol_type = genomic DNA
ctacgagaagttcagcccggccgggcccatcctctccatccgggtctgcagggacatgatcacccgccgctccttgggctacgcgtatgtgaacttccagcagc

SEQ ID NO: 971 - DNA, 27 bp, Homo sapiens
  source 1..27: mol_type = genomic DNA
gtcgcggcctgtggccctgcgggcagc

SEQ ID NO: 972 - DNA, 32 bp, Homo sapiens
  source 1..32: mol_type = genomic DNA
cccggcactcgctctcctcctctcacggaaag

SEQ ID NO: 973 - DNA, 36 bp, Homo sapiens
  source 1..36: mol_type = genomic DNA
gatttttgtccctctgcgcttgctccccgctcccct

SEQ ID NO: 974 - DNA, 46 bp, Homo sapiens
  source 1..46: mol_type = genomic DNA
tcgctccccgccggcagccggcagccagcggcagtggatcgacccc

SEQ ID NO: 975 - DNA, 57 bp, Homo sapiens
  source 1..57: mol_type = genomic DNA
ccaagaaggaaccaagagaccgaggccttcccgctgcccggacccgacaccgccacc

SEQ ID NO: 976 - DNA, 656 bp, Homo sapiens
  source 1..656: mol_type = genomic DNA
gctggctccatctacgcacgtttcggaaaccgggcccggaggggaccacgcccgctcacccgtgcccggcgtcccccggagctggggctagaggagccgggccggccgcagcgggaagaggccacaggcggccgcgcacgtggggggtggttagcgcggaggaacccggaagccctttgcaccgcccaccgccgcggtgacgggttaacgctcctcctggtggaggcaggggcgggcggggcggaaggcggggacgcctcagccaacacccccgaggaccgcccgcgagccgtcctccccacccccacggacgcgacgcagcgcgggctccgcttccccggccgcggcgcctgcgcaaaagccccgccccttcgcccgagccccacccccacaccgcagcctccaccgccgccacctctcccttcctctctgctctttcctcctgttttctcttccctcctccccctggcctccgcgtctcctcctactccggcgctgacgctcgcgtaggggccctggcgtcagacgcgcgggggcggggcgagtgcggcgcggggtataagtagagggtgcaggaggcggtgcttccccttctccccggcggttagtgctgagagtgcggagtgtgtgctccgggctcggaacacacatttatt

SEQ ID NO: 977 - DNA, 65 bp, Homo sapiens
  source 1..65: mol_type = genomic DNA
aggcaccgcttctgcggccgacgcgcgtggcggcggtgccggctgggactcgtagtgcggtccgg

SEQ ID NO: 978 - DNA, 34 bp, Homo sapiens
  source 1..34: mol_type = genomic DNA
actatgttgtgagcctgcgaaagaagtttgtgtg

SEQ ID NO: 979 - DNA, 39 bp, Homo sapiens
  source 1..39: mol_type = genomic DNA
atggaaaactgggagccgccttggaatctacagggccgg

SEQ ID NO: 980 - DNA, 121 bp, Homo sapiens
  source 1..121: mol_type = genomic DNA
cgacctcgacggccgtcctgccgaagaacctgccgtcgctgcccgcccccgtggtgcggccctgacggtcgcgcaggccgacggacgacagcgcgctccggatgaagttgggcgggtagct

SEQ ID NO: 981 - DNA, 28 bp, Homo sapiens
  source 1..28: mol_type = genomic DNA
agcctcctccaaaacagcacactttccg

SEQ ID NO: 982 - DNA, 254 bp, Homo sapiens
  source 1..254: mol_type = genomic DNA
tggttacaatggtactttcagcctgtccgaattatgtattgcccctcccctttttattaataacattgaagtgtgatgggacaaccactgaagccgtcagttgaaacctgctgggactttttagccattctcttcaacataaagaatgggtgtttttggagggggtgagaggaatggggaaatgttgtcaaagagtacaacgttttagttgagacaggaagaatatattttgttgagatctacagcacagcatg

SEQ ID NO: 983 - DNA, 73 bp, Homo sapiens; identical to SEQ ID NO: 533
  source 1..73: mol_type = genomic DNA

SEQ ID NO: 984 - DNA, 75 bp, Homo sapiens
  source 1..75: mol_type = genomic DNA
ttgtgtatctgcgttcctttcaacaagtgtgacttcctccatggcatcattcgtgagcgtaacacagagctcagc

SEQ ID NO: 985 - DNA, 172 bp, Homo sapiens
  source 1..172: mol_type = genomic DNA
gctctgagaggctcttcctaatagaactgctgcttcagtttagcttgaaaaagcccacacccagttcctaatgacaaacatctgaacaccgggtcttcccacgagcaagaccatgctatgcctcctgctcgctctgttctataagcaacccacagattgctccctgtgaaga

SEQ ID NO: 986 - DNA, 26 bp, Homo sapiens
  source 1..26: mol_type = genomic DNA
agtaaatccatttgctgattgcaata

SEQ ID NO: 987 - DNA, 34 bp, Homo sapiens; identical to SEQ ID NO: 978
  source 1..34: mol_type = genomic DNA

SEQ ID NO: 988 - DNA, 254 bp, Homo sapiens
  source 1..254: mol_type = genomic DNA
tggttacaatggtactttcagcctgtccgaattatgtattgcccctcccctttttattaataacattgaagtgtgatgggaaaaccactgaagccgtcagttgaaacctgctgggactttttagccattctcttcaacataaagaatgggtgtttttggagggggtgagaggaatggggaaatgttgtcaaagagtacagtgttttagttgagacaggaagaatatattttgttgagatctacagcacagcatg

SEQ ID NO: 989 - DNA, 25 bp, Homo sapiens
  source 1..25: mol_type = genomic DNA
cctcaatgggaaccctggtgcagaa

SEQ ID NO: 990 - DNA, 66 bp, Homo sapiens
  source 1..66: mol_type = genomic DNA
gtgcggggtggtggcactgtcagcagggaccactgggaagttgaggatgaggacatcaaaaataac

SEQ ID NO: 991 - DNA, 42 bp, Homo sapiens
  source 1..42: mol_type = genomic DNA
aaaggttaccagttcaccaactgtgctttacggtgaaaaaca

SEQ ID NO: 992 - DNA, 30 bp, Homo sapiens
  source 1..30: mol_type = genomic DNA
ccaccatgacagatgacctggcaggttatg

SEQ ID NO: 993 - DNA, 33 bp, Homo sapiens
  source 1..33: mol_type = genomic DNA
agaacagcaagaagcgattgaacacattgatga

SEQ ID NO: 994 - DNA, 69 bp, Homo sapiens
  source 1..69: mol_type = genomic DNA
atataacaaactccgccaaccattttttcagaagaggtcagaattgatcgccaaaatcccaaatttttg

SEQ ID NO: 995 - DNA, 40 bp, Homo sapiens
  source 1..40: mol_type = genomic DNA
agtggtgatccatcttcgaagtccaccgaaatcaaatgga

SEQ ID NO: 996 - DNA, 104 bp, Homo sapiens
  source 1..104: mol_type = genomic DNA
agagagcttctttacctggtttactgaccattctgatgcaggtgctgatgagttaggagaggtcatcaaagatgatatttggccaaacccattacagtactact

SEQ ID NO: 997 - DNA, 68 bp, Homo sapiens
  source 1..68: mol_type = genomic DNA
gggagcagcattccaccagaccctgatttagcaagatatttccgtatcattcccccaaccagctggaa

SEQ ID NO: 998 - DNA, 60 bp, Homo sapiens; identical to SEQ ID NO: 530
  source 1..60: mol_type = genomic DNA

SEQ ID NO: 999 - DNA, 75 bp, Homo sapiens; identical to SEQ ID NO: 531
  source 1..75: mol_type = genomic DNA

SEQ ID NO: 1000 - DNA, 27 bp, Homo sapiens
  source 1..27: mol_type = genomic DNA
cttagagggccccacagttgtttgctg

SEQ ID NO: 1001 - DNA, 254 bp, Homo sapiens
  source 1..254: mol_type = genomic DNA
tggttacaatggtactttcagcctgtccgaattatgtattgcccctcccctttttattaataacattgaagtgtgatgggacaaccactgaagccgtctgttgaaacctgctgggactttttagccattctcttcaacataaagaatgggtgtttttggagggggtgagaggaatggggaaatgttgtcaaagagtacaatgttttagttgagacaggaggaatatattttgttgagatctacagcacagcatg

SEQ ID NO: 1002 - DNA, 28 bp, Homo sapiens
  source 1..28: mol_type = genomic DNA
agcctcctccaaaacagcacactttccg

SEQ ID NO: 1003 - DNA, 80 bp, Homo sapiens
  source 1..80: mol_type = genomic DNA
aaaaatgagcaggtgcgggatgtgcgcagagtcggagaagagtccagggcgcccggagtggctccaggaacgacggaaac

SEQ ID NO: 1004 - DNA, 34 bp, Homo sapiens; identical to SEQ ID NO: 978
  source 1..34: mol_type = genomic DNA

SEQ ID NO: 1005 - DNA, 389 bp, Homo sapiens
  source 1..389: mol_type = genomic DNA
tcatgtcttagagcccgtctttatgtttaaaactaatttcttaaaataaagccttcagtaaatgttcattaccaacttgataaatgctactcataagagctggtttggggctatagcatatgcttttttttttttaattattacctgatttaaaaatctctgtaaaaacgtgtagtgtttcataaaatctgtaactcgcattttaatgatccgctattataagcttttaatagcatgaaaattgttaggctatataacattgccacttcaactctaaggaatatttttgagatatccctttggaagaccttgcttggaagagcctggacactaacaattctacaccaaattgtctcttcaaatacgtatggactggataactctgagaa

SEQ ID NO: 1006 - DNA, 170 bp, Homo sapiens
  source 1..170: mol_type = genomic DNA
ctaattcaattgcaagagtgggagtaaatgacttctgtccaacagtgccaaagatgaagaaatctttatacagtgcaataagtttattcaacaacccggtgaaatactgggaaatgcaacctgcaacatttcgttgtgttttgagcagaatgagcgttcagcttgggaac

SEQ ID NO: 1007 - DNA, 405 bp, Homo sapiens
  source 1..405: mol_type = genomic DNA
tgacaactcttaactggctggaaggggccacagattccttggagaatctaataaagatttagatcttcccaagaacaaaagttttcatcttccaaggagcttgagaacaaaactgggcaacaagccactctgcctcttctctttttctttccggtgtatctttaaacaagtttcgttcactgtactcctttgagatacaaaccatcaaaatgaatgtaatataggcaggtgctaatctcaagatcacaacttttgctttgacttttccaaatgctgcatttggatgtctgtttagccagtgactacaacttgagtccgtcctctctcaagctgccccatccctgatgtcatttctgcttaatttgctccacaactctgcttccagcttctggtctctcttaaatc

SEQ ID NO: 1008 - DNA, 134 bp, Homo sapiens
  source 1..134: mol_type = genomic DNA
acattctacttgtgttcagtagatattggtatttttcttcagtttttataacacactttagcacacctcaagcaaagaccaagtaagcagcaagggtgattcaaacataatgactctccaggttgcatgaggtg

SEQ ID NO: 1009 - DNA, 117 bp, Homo sapiens
  source 1..117: mol_type = genomic DNA
atcacagatatcgaaaatgggagtcttgctaacataccacgtgtgagagaaatacatttggaaaacaataaactaaaaaaaatcccttcaggattaccagagttgaaatacctccag

SEQ ID NO: 1010 - DNA, 85 bp, Homo sapiens
  source 1..85: mol_type = genomic DNA
taggacaggcttatattctaactagtttgcggtgttttcagctaactctatcacacctaaccatctgtgtaagacttgatgcatt

SEQ ID NO: 1011 - DNA, 68 bp, Homo sapiens
  source 1..68: mol_type = genomic DNA
gcttaccaccaactttattggagcttcacttagattataataaaatttcaacagtggaacttgaggat

SEQ ID NO: 1012 - DNA, 215 bp, Homo sapiens
  source 1..215: mol_type = genomic DNA
gataaatgatatcacatggaagctgtcagccaaatccacaaaaggagtgtctcaaacaaattaatatggaaataaatcaaaagaagagggagaaaaaaggagggagtatgttgtacattaagagagatttcaagagcgataagaaccaaatgtattctgtaaacttcatttaatcctaacttgaacaaatcaactgtaaaatgacgtatttgaga

SEQ ID NO: 1013 - DNA, 177 bp, Homo sapiens
  source 1..177: mol_type = genomic DNA
ccggtacaaaagtgtgctaacatttgtcagcagttactgagcttctgccaaattcacacctctgctcgttttatcctagaggctacacttcaatcttctctctggttacccaccttccccatttcctaagggacacaacagttccctcaacttctacaagtcctctcccagagatta

SEQ ID NO: 1014 - DNA, 352 bp, Homo sapiens
  source 1..352: mol_type = genomic DNA
cccaggcatttagccacagtttgaggtgaagcctatgagcccagactgggcagcccctggctctggcaggaatggacatgccattcaaggcaaggcattttgtacccagcttcttcccaggtgtactgtgaagactaatgggccaatacacagaaaggtctgaggacaacatccagcacgtaggaagtgaccacctgtgacataatcattaccaagatgagcactgtgctctttatcatggctttgtgtgacccaaggctagcacctcaagtagaatgctccttaagtctgccagatgaccagtgttctaacccattacttccaagctccctgtctgatgattagctgcata

SEQ ID NO: 1015 - DNA, 86 bp, Homo sapiens
  source 1..86: mol_type = genomic DNA
taataatgggatagagccaggggcatttgaaggggtgacggtgttccatatcagaattgcagaagcaaaactgacctcagttccta

SEQ ID NO: 1016 - DNA, 133 bp, Homo sapiens
  source 1..133: mol_type = genomic DNA
cctgaacaacaacaagctaacgaagattcacccaaaagcctttctaaccacaaagaagttgcgaaggctgtatctgtcccacaatcaactaagtgaaataccacttaatcttcccaaatcattagcagaactc

SEQ ID NO: 1017 - DNA, 26 bp, Homo sapiens
  source 1..26: mol_type = genomic DNA
aatactggtaaatcaaatccacttcc

SEQ ID NO: 1018 - DNA, 28 bp, Homo sapiens
  source 1..28: mol_type = genomic DNA
attccatttgatactcgaatgcttgatc

SEQ ID NO: 1019 - DNA, 95 bp, Homo sapiens
  source 1..95: mol_type = genomic DNA
atgggtcttaagctttacctgtggaattctcatgagaaagagattaagatgcaagtactgtttgagaaaacttgttcatgtagaacgactgtgga

SEQ ID NO: 1020 - DNA, 381 bp, Homo sapiens
  source 1..381: mol_type = genomic DNA
tgctattctgacaatttaaaggatggaaaaagtctcattgaaatttcaaaaataatctgagtgtataagtttttttcatttaagtttttaggtggaaagtacagcaaaccccaaagtacatccaaacttatttttaaaattaagaaaatcaaaggaaaactaagggaatgttgtccatagaacatttccttctcttccccagttaaatcaaagcatttaattttaattcccttcagagagaatggacatcacatgcagttctatctcagggtgctagcaggttgagactgtacttttcagtaaaactccatgataacaaaataagctgcatgtctagaacaatgaaatgagttatagaaagcttgtgaaatctctaatcta

SEQ ID NO: 1021 - DNA, 60 bp, Homo sapiens
  source 1..60: mol_type = genomic DNA
tttgatctgtttccaatgtgtccatttggatgtcagtgctattcacgagttgtacattgc

SEQ ID NO: 1022 - DNA, 92 bp, Homo sapiens
  source 1..92: mol_type = genomic DNA
tgtgctcctattattcctggctttgtgctctgccaaacccttctttagcccttcacacatcgcactgaagaatatgatgctgaaggatatgg

SEQ ID NO: 1023 - DNA, 30 bp, Homo sapiens
  source 1..30: mol_type = genomic DNA
tcctagactggtcttctacactaagacacc

SEQ ID NO: 1024 - DNA, 468 bp, Homo sapiens
  source 1..468: mol_type = genomic DNA
gaagtttggggatatcacagctatattaaatgaaacagtaaatatatttttcaatatttaaaatattttctaatgtgtatttaaaatgtgtgaattactgaaatgtcaattttacttatacatttgaatattcatttttttccttgataaatgtcttccttattataatgaaatggcactgaaaagttcaaatggaaatctattcaattccaagaaagaatacttatcagcaatagtttagctagcactatattcaatatgaaagattaggaaattttcacagcatgtatacagtcagaatttaacactttcaaagatttcctttgtctactcccaaagtaaatttctgattaaattttagattaaaaaatttaagcaatgtattcaatattctactccctagtaatctaaatagcgcacagcattctttcatgttaatctattcagaggtgtggcacccaggaaaca

SEQ ID NO: 1025 - DNA, 198 bp, Homo sapiens
  source 1..198: mol_type = genomic DNA
tggactaatctgtgggagcagtttattccagtatcacccagggtgcagccacaccaggactgtgttgaagggtgttttttttcttttaaatgtaatacctcctcatcttttcttcttacacagtgtctgagaacatttacattatagataagtagtacatggtggataacttctacttttaggaggactactctcttc

SEQ ID NO: 1026 - DNA, 29 bp, Homo sapiens
  source 1..29: mol_type = genomic DNA
ggaaacgcctcttcacactaaaggaagaa

SEQ ID NO: 1027 - DNA, 30 bp, Homo sapiens
  source 1..30: mol_type = genomic DNA
tgacttccttactattgcttcctggactaa

SEQ ID NO: 1028 - DNA, 1377 bp, Homo sapiens
  source 1..1377: mol_type = genomic DNA
actcgtgagcacatctttagggaccaagagtgactttctgtaaggagtgactcgtggcttgccttggtctcttgggaatacttttctaactagggttgctctcacctgagacattctccacccgcggaatctcagggtcccaggctgtgggccatcacgacctcaaactggctcctaatctccagctttcctgtcattgaaagcttcggaagtttactggctctgctcccgcctgttttctttctgactctatctggcagcccgatgccacccagtacaggaagtgacaccagtactctgtaaagcatcatcatccttggagagactgagcactcagcaccttcagccacgatttcaggatcgcttccttgtgagccgctgcctccgaaatctcctttgaagcccagacatctttctccagcttcagacttgtagatataactcgttcatcttcatttactttccactttgccccctgtcctctctgtgttccccaaatcagagaatagcccgccatcccccaggtcacctgtctggattcctccccattcacccaccttgccaggtgcaggtgaggatggtgcaccagacagggtagctgtcccccaaaatgtgccctgtgcgggcagtgccctgtctccacgtttgtttccccagtgtctggcggggagccaggtgacatcataaatacttgctgaatgaatgcagaaatcagcggtactgacttgtactatattggctgccatgatagggttctcacagcgtcatccatgatcgtaagggagaatgacattctgcttgagggagggaatagaaaggggcagggaggggacatctgagggcttcacagggctgcaaagggtacagggattgcaccagggcagaacaggggagggtgttcaaggaagagtggctcttagcagaggcactttggaaggtgtgaggcataaatgcttccttctacgtaggccaacctcaaaactttcagtaggaatgttgctatgatcaagttgttctaacactttagacttagtagtaattatgaacctcacatagaaaaatttcatccagccatatgcctgtggagtggaatattctgtttagtagaaaaatcctttagagttcagctctaaccagaaatcttgctgaagtatgtcagcaccttttctcaccctggtaagtacagtatttcaagagcacgctaagggtggttttcattttacagggctgttgatgatgggttaaaaatgttcatttaagggctacccccgtgtttaatagatgaacaccacttctacacaaccctccttggtactgggggagggagagatctgacaaatactgcccattcccctaggctgactggatttgagaaca

SEQ ID NO: 1029 - DNA, 115 bp, Homo sapiens
  source 1..115: mol_type = genomic DNA
atgagcgcacggatgaatggagcttacaagatctgtctttccaatggccgggggcatttggtccccaaattaaggctattggacatctgcacaggacagtcctatttttgatgtc

SEQ ID NO: 1030 - DNA, 50 bp, Homo sapiens
  source 1..50: mol_type = genomic DNA
aggaacaactatcctcgtctgtcccaacactgagcaggcactcggtaaac

SEQ ID NO: 1031 - DNA, 227 bp, Homo sapiens
  source 1..227: mol_type = genomic DNA
atttgctgggtctgaatcggcttcataaactccactgggagcactgctgggctcctggactgagaatagttgaacaccgggggctttgtgaaggagtctgggccaaggtttgccctcagctttgcagaatgaagccttgaggtctgtcaccacccacagccaccctacagcagccttaactgtgacacttgccacactgtgtcgtcgtttgtttgcctatgtcctcc

SEQ ID NO: 1032 - DNA, 60 bp, Homo sapiens
  source 1..60: mol_type = genomic DNA
ggacaatgtgtgtgtcaagaaaataagaaccagaagtcatagggacagtgaagatatttg

SEQ ID NO: 1033 - DNA, 108 bp, Homo sapiens
  source 1..108: mol_type = genomic DNA
gttcagcaaacgaaactcatgtagcaataacctcttcagatacagaattctggcaagtacagctgtccagacagaccctcttcggcacaaactaggaagcttcaactg

SEQ ID NO: 1034 - DNA, 155 bp, Homo sapiens
  source 1..155: mol_type = genomic DNA
cagaagagtgcgaaggttctcatgcagaatcagaaagggaaaggagaagcaggaaattcagactccatgtgcctgagatcaagaaagacaaaaagccagcctgcagcaagcactttggagagcaaatctgtgcagagagtaacgcggagtgtcaa

SEQ ID NO: 1035 - DNA, 30 bp, Homo sapiens
  source 1..30: mol_type = genomic DNA
gagcccggaaacccatacctagagacaaag

SEQ ID NO: 1036 - DNA, 26 bp, Homo sapiens
  source 1..26: mol_type = genomic DNA
tatccctgcgctccagacgccaaaat

SEQ ID NO: 1037 - DNA, 27 bp, Homo sapiens
  source 1..27: mol_type = genomic DNA
gagcaaagtaccaaggcattaccttga

SEQ ID NO: 1038 - DNA, 226 bp, Homo sapiens
  source 1..226: mol_type = genomic DNA
aagaggctgcgctgcatgccagcaccagaggaaattgtggaggagctgccagccagcaagaagcagagggttgctcccagggcaagaggcaaatcatccgaacccgtggtcatcatgaagagaagtttgaggacttctgcaaaaagaattgaacctgcggaagagctgaacagcaacgacatgaaaaccaacaaagaggaacacaaattacaagactcggtccctg

SEQ ID NO: 1039 - DNA, 1286 bp, Homo sapiens
  source 1..1286: mol_type = genomic DNA
cccgtgctctagaagacctggttgacttcaaagagctcttctcagcaccaggtcacactgaagagtcaatgactattgacaaaaacacaaaaattccctgcaaatctcccccaccagaactaacagacactgccacgagcacaaagagatgccccaagacacgtcccaggaaagaagtaaaagaggagctctcagcagttgagaggctcacgcaaacatcagggcaaagcacacacacacacaaagaaccagcaagcggtgatgagggcatcaaagtattgaagcaacgtgcaaagaagaaaccaaacccagtagaagaggaacccagcaggagaaggccaagagcacctaaggaaaaggcccaacccctggaagacctggccggcttcacagagctctctgaaacatcaggtcacactcaggaatcactgactgctggcaaagccactaaaataccctgcgaatctcccccactagaagtggtagacaccacagcaagcacaaagaggcatctcaggacacgtgtgcagaaggtacaagtaaaagaagagccttcagcagtcaagttcacacaaacatcaggggaaaccacggatgcagacaaagaaccagcaggtgaagataaaggcatcaaagcattgaaggaatctgcaaaacagacaccggctccagcagcaagtgtaactggcagcaggagacggccaagagcacccagggaaagtgcccaagccatagaagacctagctggcttcaaagacccagcagcaggtcacactgaagaatcaatgactgatgacaaaaccactaaaataccctgcaaatcatcaccagaactagaagacaccgcaacaagctcaaagagacggcccaggacacgtgcccagaaagtagaagtgaaggaggagctgttagcagttggcaagctcacacaaacctcaggggagaccacgcacaccgacaaagagccggtaggtgagggcaaaggcacgaaagcatttaagcaacctgcaaagcggaagctggacgcagaagatgtaattggcagcaggagacagccaagagcacctaaggaaaaggcccaacccctggaagatctggccagcttccaagagctctctcaaacaccaggccacactgaggaactggcaaatggtgctgctgatagctttacaagcgctccaaagcaaacacctgacagtggaaaacctctaaaaatatccagaagagttcttcgggcccctaaagtagaacccgtgggagacgtggtaagcaccagagaccctgta

SEQ ID NO: 1040 - DNA, 3489 bp, Homo sapiens
  source 1..3489: mol_type = genomic DNA
ggagaactcttagcgtgcaggaatctaatgccatcagcaggcaaagccatgcacacgcctaaaccatcagtaggtgaagagaaagacatcatcatatttgtgggaactccagtgcagaaactggacctgacagagaacttaaccggcagcaagagacggccacaaactcctaaggaagaggcccaggctctggaagacctgactggctttaaagagctcttccagacccctggtcatactgaagaagcagtggctgctggcaaaactactaaaatgccctgcgaatcttctccaccagaatcagcagacaccccaacaagcacaagaaggcagcccaagacacctttggagaaaagggacgtacagaaggagctctcagccctgaagaagctcacacagacatcaggggaaaccacacacacagataaagtaccaggaggtgaggataaaagcatcaacgcgtttagggaaactgcaaaacagaaactggacccagcagcaagtgtaactggtagcaagaggcacccaaaaactaaggaaaaggcccaacccctagaagacctggctggcttgaaagagctcttccagacaccagtatgcactgacaagcccacgactcacgagaaaactaccaaaatagcctgcagatcacaaccagacccagtggacacaccaacaagctccaagccacagtccaagagaagtctcaggaaagtggacgtagaagaagaattcttcgcactcaggaaacgaacaccatcagcaggcaaagccatgcacacacccaaaccagcagtaagtggtgagaaaaacatctacgcatttatgggaactccagtgcagaaactggacctgacagagaacttaactggcagcaagagacggctacaaactcctaaggaaaaggcccaggctctagaagacctggctggctttaaagagctcttccagacacgaggtcacactgaggaatcaatgactaacgataaaactgccaaagtagcctgcaaatcttcacaaccagacccagacaaaaacccagcaagctccaagcgacggctcaagacatccctggggaaagtgggcgtgaaagaagagctcctagcagttggcaagctcacacagacatcaggagagactacacacacacacacagagccaacaggagatggtaagagcatgaaagcatttatggagtctccaaagcagatcttagactcagcagcaagtctaactggcagcaagaggcagctgagaactcctaagggaaagtctgaagtccctgaagacctggccggcttcatcgagctcttccagacaccaagtcacactaaggaatcaatgactaacgaaaaaactaccaaagtatcctacagagcttcacagccagacctagtggacaccccaacaagctccaagccacagcccaagagaagtctcaggaaagcagacactgaagaagaatttttagcatttaggaaacaaacgccatcagcaggcaaagccatgcacacacccaaaccagcagtaggtgaagagaaagacatcaacacgtttttgggaactccagtgcagaaactggaccagccaggaaatttacctggcagcaatagacggctacaaactcgtaaggaaaaggcccaggctctagaagaactgactggcttcagagagcttttccagacaccatgcactgataaccccacgactgatgagaaaactaccaaaaaaatactctgcaaatctccgcaatcagacccagcggacaccccaacaaacacaaagcaacggcccaagagaagcctcaagaaagcagacgtagaggaagaatttttagcattcaggaaactaacaccatcagcaggcaaagccatgcacacgcctaaagcagcagtaggtgaagagaaagacatcaacacatttgtggggactccagtggagaaactggacctgctaggaaatttacctggcagcaagagacggccacaaactcctaaagaaaaggccaaggctctagaagatctggctggcttcaaagagctcttccagacaccaggtcacactgaggaatcaatgaccgatgacaaaatcacagaagtatcctgcaaatctccacaaccagacccagtcaaaaccccaacaagctccaagcaacgactcaagatatccttggggaaagtaggtgtgaaagaagaggtcctaccagtcggcaagctcacacagacgtcagggaagaccacacagacacacagagagacagcaggagatggaaagagcatcaaagcgtttaaggaatctgcaaagcagatgctggacccagcaaactatggaactgggatggagaggtggccaagaacacctaaggaagaggcccaatcactagaagacctggccggcttcaaagagctcttccagacaccagaccacactgaggaatcaacaactgatgacaaaactaccaaaatagcctgcaaatctccaccaccagaatcaatggacactccaacaagcacaaggaggcggcccaaaacacctttggggaaaagggatatagtggaagagctctcagccctgaagcagctcacacagaccacacacacagacaaagtaccaggagatgaggataaaggcatcaacgtgttcagggaaactgcaaaacagaaactggacccagcagcaagtgtaactggtagcaagaggcagccaagaactcctaagggaaaagcccaacccctagaagacttggctggcttgaaagagctcttccagacaccaatatgcactgacaagcccacgactcatgagaaaactaccaaaatagcctgcagatctccacaaccagacccagtgggtaccccaacaatcttcaagccacagtccaagagaagtctcaggaaagcagacgtagaggaagaatccttagcactcaggaaacgaacaccatcagtagggaaagctatggacacacccaaaccagcaggaggtgatgagaaagacatgaaagcatttatgggaactccagtgcagaaattggacctgccaggaaatttacctggcagcaaaagatggccacaaactcctaaggaaaaggcccaggctctagaagacctggctggcttcaaagagctcttccagacaccaggcactgacaagcccacgactgatgagaaaactaccaaaatagcctgcaaatctccacaaccagacccagtggacaccccagcaagcacaaagcaacggcccaagagaaacctcaggaaagcagacgtagaggaagaatttttagcactcaggaaacgaacaccatcagcaggcaaagccatggacacaccaaaaccagcagtaagtgatgagaaaaatatcaacacatttgtggaaactccagtgcagaaactggacctgctaggaaatttacctggcagcaagagacagccacagactcctaaggaaaaggctgaggctctagaggacctggttggcttcaaagaa

SEQ ID NO: 1041 - DNA, 389 bp, Homo sapiens
  source 1..389: mol_type = genomic DNA
aacaacagttgaaggcatccctggggaaagtaggtgtgaaagaagagctcctagcagtcggcaagttcacacggacgtcaggggagaccacgcacacgcacagagagccagcaggagatggcaagagcatcagaacgtttaaggagtctccaaagcagatcctggacccagcagcccgtgtaactggaatgaagaagtggccaagaacgcctaaggaagaggcccagtcactagaagacctggctggcttcaaagagctcttccagacaccaggtccctctgaggaatcaatgactgatgagaaaactaccaaaatagcctgcaaatctccaccaccagaatcagtggacactccaacaagcacaaagcaatggcctaagagaagtctc

SEQ ID NO: 1042 - DNA, 334 bp, Homo sapiens
  source 1..334: mol_type = genomic DNA
tgcaaacaggtcaggaaggtctacagagttcaggaatatacagaagctacctgtggaaagtaagagtgaagaaacaaatacagaaattgttgagtgcatcctaaaaagaggtcagaaggcaacactactacaacaaaggagagaaggagagatgaaggaaatagaaagaccttttgagacatataaggaaaatattgaattaaaagaaaacgatgaaaagatgaaagcaatgaagagatcaagaacttgggggcagaaatgtgcaccaatgtctgacctgacagacctcaagagcttgcctgatacagaactcatgaaagacacggcacgtggc

SEQ ID NO: 1043 - DNA, 62 bp, Homo sapiens
  source 1..62: mol_type = genomic DNA
cccagtgaaggagcaaccgcagttgacaagcacatgtcacatcgctatttcaaattcagaga

SEQ ID NO: 1044 - DNA, 102 bp, Homo sapiens
  source 1..102: mol_type = genomic DNA
tggcctctagatcctagcagggaggcctatgggtctcaggagcccgtcaccagcctccgtgctccagagctcacgtgtggggtcttgttaggaggacccaga

SEQ ID NO: 1045 - DNA, 90 bp, Homo sapiens
  source 1..90: mol_type = genomic DNA
taaaaacgtagtcttagatcttataaatcttttgactctactgttttttactgtgttaatgtttgttttgctaactttgtttatctgctg

SEQ ID NO: 1046 - DNA, 84 bp, Homo sapiens
  source 1..84: mol_type = genomic DNA
cgcaaactctccttgtaccataataatagggaaagctcatactgaaaaagtacatgtgcctgctcgaccctacagagtgctcaa

SEQ ID NO: 1047 - DNA, 26 bp, Homo sapiens
  source 1..26: mol_type = genomic DNA
agcctgtgggcgaagttcacagtcaa

SEQ ID NO: 1048 - DNA, 73 bp, Homo sapiens
  source 1..73: mol_type = genomic DNA
catgggcagatgtagtaaaacttggtgcaaaacaaacacaaactaaagtcataaaacatggtcctcaaaggtc

SEQ ID NO: 1049 - DNA, 84 bp, Homo sapiens
  source 1..84: mol_type = genomic DNA
aagagagtgtctatcagccgaagtcaacatgatattttacagatgatatgttccaaaagaagaagtggtgcttcggaagcaaat

SEQ ID NO: 1050 - DNA, 116 bp, Homo sapiens
  source 1..116: mol_type = genomic DNA
aaacaagagtcaggttcagaaatccatgtggaagtgaaggcacaaagcttggttataagccctccagctcctagtcctaggaaaactccagttgccagtgatcaacgccgtaggtc

SEQ ID NO: 1051 - DNA, 134 bp, Homo sapiens
  source 1..134: mol_type = genomic DNA
cctttgaaaagaaggcgtgtgtcctttggtgggcacctaagacctgaactatttgatgaaaacttgcctcctaatacgcctctcaaaaggggagaagccccaaccaaaagaaagtctctggtaatgcacactcc

SEQ ID NO: 1052 - DNA, 66 bp, Homo sapiens
  source 1..66: mol_type = genomic DNA
ggacagatgtgctctgggttacctggtcttagttcagttgatatcaacaactttggtgattccatt

SEQ ID NO: 1053 - DNA, 31 bp, Homo sapiens
  source 1..31: mol_type = genomic DNA
ttgagaggaagatccaaaaggattccctcag

SEQ ID NO: 1054 - DNA, 149 bp, Homo sapiens
  source 1..149: mol_type = genomic DNA
gaagctttcaactagaaatcgaacaccagctaaagttgaagatgcagctgactctgccactaagccagaaaatctctcttccaaaaccagaggaagtattcctacagatgtggaagttctgcctacggaaactgaaattcacaatgagc

SEQ ID NO: 1055 - DNA, 416 bp, Homo sapiens
  source 1..416: mol_type = genomic DNA
ccagcgttaaattagtgagccgttatggagaattgaagtctgttcccactacacaatgtcttgacaatagcaaaaaaaatgaatctcccttttggaagctttatgagtcagtgaagaaagagttggatgtaaaatcacaaaaagaaaatgtcctacagtattgtagaaaatctggattacaaactgattacgcaacagagaaagaaagtgctgatggtttacagggggagacccaactgttggtctcgcgtaagtcaagaccaaaatctggtgggagcggccacgctgtggcagagcctgcttcacctgaacaagagcttgaccagaacaaggggaagggaagagacgtggagtctgttcagactcccagcaaggctgtgggcgccagctttcctctctatgagccggctaaaatg

SEQ ID NO: 1056 - DNA, 33 bp, Homo sapiens
  source 1..33: mol_type = genomic DNA
agccagcacgtcgtgtctcaagatctagcttct

SEQ ID NO: 1057 - DNA, 125 bp, Homo sapiens
  source 1..125: mol_type = genomic DNA
ggctctcagatccaccctaagtatccaccagccaagagggcgcacatgccaagtggagcctcagttcatcgacaggtcctatggcccatttatgagaaaactgatgacgcagtcagtagttctga

SEQ ID NO: 1058 - DNA, 30 bp, Homo sapiens
  source 1..30: mol_type = genomic DNA
ttcagaatggaaggaagtcaactgaatttc

SEQ ID NO: 1059 - DNA, 86 bp, Homo sapiens
  source 1..86: mol_type = genomic DNA
ccaacacaagtaaatgggtctgttattgatgagcctgtacggctaaaacatggagatgtaataactattattgatcgttccttcag

SEQ ID NO: 1060 - DNA, 43 bp, Homo sapiens
  source 1..43: mol_type = genomic DNA
tgtgacatccgtatccagcttcctgttgtgtcaaaacaacatt

SEQ ID NO: 1061 - DNA, 91 bp, Homo sapiens
  source 1..91: mol_type = genomic DNA
ggctccttgtggcaataggaaaatgggacagaaagtcttcctgcctggaattcgagaacgtttcctcttatattgctgtcctgtttggtgg

SEQ ID NO: 1062 - DNA, 30 bp, Homo sapiens
  source 1..30: mol_type = genomic DNA
cctgagcctcagcacctgcttgtttggaag

SEQ ID NO: 1063 - DNA, 26 bp, Homo sapiens
  source 1..26: mol_type = genomic DNA
cccacgagacgcctggttactatcaa

SEQ ID NO: 1064 - DNA, 72 bp, Homo sapiens
  source 1..72: mol_type = genomic DNA
tttgcttctggccttcccctacggattatacctggccttcccctacggattatactcaacttactgtttaga

SEQ ID NO: 1065 - DNA, 265 bp, Homo sapiens
  source 1..265: mol_type = genomic DNA
gactcggtgggagccgctagagccgggcgcccggggacgtagcctgtagggccaccgggtccccgtcagaggcggcggcgggagcagcggggactgcaggccggggtgcagcgaacgcgaccccgcgggctgcggcccggtgtgtgcggagcgtggcgggcgcagcttaccgggcggaggtgagcgcggcgccggctcctcctgcggcggactttgggtgcgacttgacgagcggtggttcgacaagtggccttgcgggccggat

SEQ ID NO: 1066 - DNA, 96 bp, Homo sapiens
  source 1..96: mol_type = genomic DNA
atggctctctgtttcacatcaatcacgggaaccccttcaacatggaagtgttggtggactcctggcccgagtatcagatggttattatccgacctc

SEQ ID NO: 1067 - DNA, 275 bp, Homo sapiens
  source 1..275: mol_type = genomic DNA
tgcgttacatcaagcgctgcctaggagccctgccagcagcctgtatgctgggcccagagggggtcccggtctcatgggtaaccatggacccttcttgtgaaataggaatgggctacagtgtggaaaaataccgaaggagaggcaatgggacacggctgatcatgcgatgcatgaagtatctgtgtcagaagaatattccattttacggctctgtgctggaagaaaatcaaggcgtcatcagaaagactagtgcactaggtttccttgaggcctcc

SEQ ID NO: 1068 - DNA, 56 bp, Homo sapiens
  source 1..56: mol_type = genomic DNA
atggacgatctaggaaactttcagggagctaaggtgtcggagagcaaagtatcctt

SEQ ID NO: 1069 - DNA, 128 bp, Homo sapiens
  source 1..128: mol_type = genomic DNA
gtcccgctacttcgtcaccaaagcgcccgccgcgctcgcatctgctgtgaggctgtgctcgggccgctcccgccgagggaacggccctcccaaggctctgcgccccaattctcgctcgtttgccaaga

SEQ ID NO: 1070 - DNA, 241 bp, Homo sapiens
  source 1..241: mol_type = genomic DNA
tgtcgacccaggttaggaagcccgaggtcggggcgttaccccaagggccctcccgcttcccctccgagggcagagaggcgtccgcgcccggacgcactgcgggaacacctggagcgccggcggagctcggctgtccccgcgggagggagcccgacgcgcatccttgggacccggacccggcgcccgcgcctcgggacggatttctgcctcggctgcaggcgcagcgcgcagacctgagcct

SEQ ID NO: 1071 - DNA, 104 bp, Homo sapiens
  source 1..104: mol_type = genomic DNA
cctggaagagaatggcgggcatctttttcctgccatttatctcatcaggttttgctcctcggtttaagcaggaagagaacttcatgcttggaagagcgcatccg

SEQ ID NO: 1072 - DNA, 180 bp, Homo sapiens
  source 1..180: mol_type = genomic DNA
gctgaagaatcgatctgtgggacttggaactgaaagcacaggtcggggtaagccccacttcacactggagggccacaagttcctgatcttcgggggctccatccactatttccgggtgcccagggagtactggagggaccgcctgctgaagctgaaggcctgtggcttcaatactgtcac

SEQ ID NO: 1073 - DNA, 66 bp, Homo sapiens
  source 1..66: mol_type = genomic DNA
atgttccgtggaacctgcatgagccagaaagaggcaaatttgacttctctgggaacctggacctgg

SEQ ID NO: 1074 - DNA, 27 bp, Homo sapiens
  source 1..27: mol_type = genomic DNA
gctactgggggtggattagcaaccaaa

SEQ ID NO: 1075 - DNA, 56 bp, Homo sapiens
  source 1..56: mol_type = genomic DNA
cccgatggggctgtgcagaggctctgaggctgggagcagctcaggccaccgacctg

SEQ ID NO: 1076 - DNA, 49 bp, Homo sapiens
  source 1..49: mol_type = genomic DNA
cctcatcctgggccgtcgtgggaggggctgacgatgtggacctccctag

SEQ ID NO: 1077 - DNA, 92 bp, Homo sapiens
  source 1..92: mol_type = genomic DNA
ccttcgtcctgatggccgcagagatcgggctgtgggtgattctgcgtccaggccgctacatctgcagtgagatggacctcgggggcttgccc

SEQ ID NO: 1078 - DNA, 68 bp, Homo sapiens
  source 1..68: mol_type = genomic DNA
ctggctcctgcaagacccccggttactgttgaggacaaccaacaagagcttcattgaagcagttgaga

SEQ ID NO: 1079 - DNA, 99 bp, Homo sapiens
  source 1..99: mol_type = genomic DNA
gcgcccaacagcattgccttttttatggtgtacccagacctcatgcacttgataagaaacgccttcatttttaccatggcaacctagagcacacagtca

SEQ ID NO: 1080 - DNA, 95 bp, Homo sapiens
  source 1..95: mol_type = genomic DNA
agaagcacaaatgccgttcacaggcacatgtatgcaacgaggaaagctaatttacaggcatcccattgaactgtgggaaatgctaggaaactttt

SEQ ID NO: 1081 - DNA, 46 bp, Homo sapiens
  source 1..46: mol_type = genomic DNA
taagtgaaatgtaatgccccatacctcgcataccttgcactaattt

SEQ ID NO: 1082 - DNA, 39 bp, Homo sapiens
  source 1..39: mol_type = genomic DNA
tcatcgcggtgcaagtggagaatgagtatggctcattca

SEQ ID NO: 1083 - DNA, 37 bp, Homo sapiens
  source 1..37: mol_type = genomic DNA
agaagagggattgtggagcttctcttgacctctgatg

SEQ ID NO: 1084 - DNA, 28 bp, Homo sapiens
  source 1..28: mol_type = genomic DNA
gtgagaaacatgtgctgagtggccacac

SEQ ID NO: 1085 - DNA, 309 bp, Homo sapiens
  source 1..309: mol_type = genomic DNA
agccagcccgtgtaaatcttgaacacactgcagagaaaaccaagtgcatctcgatacctccctttcccgtgtccactgggatggatcctggagttcgatgttacaataaatgaggactcaaggttaaggctcagggccactcacagctccctatcttggccttgctcctgccgtctttaaacacagcagcactggagctcctctgttctcaggacgcctttccatctcccatagtttttctgtggcaagaaatctgcattggtgctgcgcctggcttgggatcagggccatctccactaacttgggaaa

SEQ ID NO: 1086 - DNA, 57 bp, Homo sapiens
  source 1..57: mol_type = genomic DNA
tgttggccgccatcaatttgcaaaaacttcaccaggatactttcaatcagcttcata

SEQ ID NO: 1087 - DNA, 49 bp, Homo sapiens
  source 1..49: mol_type = genomic DNA
ctggtattccgtgaaaacaggtttgacaagaagaccgcaggttttcacc

SEQ ID NO: 1088 - DNA, 61 bp, Homo sapiens
  source 1..61: mol_type = genomic DNA
ggaggagggaaccctgcttgtgtcacctccgcttgtggatcacgtcatggagatgagtggg

SEQ ID NO: 1089 - DNA, 277 bp, Homo sapiens
  source 1..277: mol_type = genomic DNA
atactgtcttggagatcagcctgcctttcattctgctaggccatgtgggattttgtgttcccctcgtctggagttaggctggttgtggggtttgttgttgctgtgttatcctttgtgcatcatgggcttcaaatgtttctggtggtaccttgtgtcaagggcaagtgctggtttggcagaggttgttttctctgtgtctgcattcccctctgagtctcgcctttgcattgagtcccacagagaatctgttgcttgcggatctctcagctatagtatg

SEQ ID NO: 1090 - DNA, 26 bp, Homo sapiens
  source 1..26: mol_type = genomic DNA
ctctcagatgcctcacaagcagcaac

SEQ ID NO: 1091 - DNA, 91 bp, Homo sapiens
  source 1..91: mol_type = genomic DNA
ccataattttgtccttctaagcttctgatgcactgaattatgtaaagtgcattcccttcaccagcttgtgcaccctattctgtaactgata

SEQ ID NO: 1092 - DNA, 68 bp, Homo sapiens
  source 1..68: mol_type = genomic DNA
ccttctgattatggaatactgggtcggctggttcgacagatggggagataagcaccatgttaaagatg

SEQ ID NO: 1093 - DNA, 38 bp, Homo sapiens
  source 1..38: mol_type = genomic DNA
acatgctgtgtctgaattcatcaaatatgagatctcct

SEQ ID NO: 1094 - DNA, 54 bp, Homo sapiens
  source 1..54: mol_type = genomic DNA
ctttggtttcatgaacggggccacatatttcgggaagcactcgggcattgtcac

SEQ ID NO: 1095 - DNA, 26 bp, Homo sapiens
  source 1..26: mol_type = genomic DNA
gtcgctggtgtagtagcctctccagc

SEQ ID NO: 1096 - DNA, 40 bp, Homo sapiens
  source 1..40: mol_type = genomic DNA
gaggctccggaagcctgttctggcaccactgggttcttga

SEQ ID NO: 1097 - DNA, 506 bp, Homo sapiens
  source 1..506: mol_type = genomic DNA
cccaacaggctgtcattgcagtagacagggctttccgggacttagagctccgcttcacacatctggtatactgccctgttggcttgaacctctgaagagaggcagggtaggaacggtgactgctgtaaaggcacagacctgcacggccgggcgatacagactgagcaaagaaaagagtacccgttgaaggggtgtccactcttttggcttccctgggccacactggaagaagaagaattgtcttgggccacacatgaaatacactaacactaatgatagctgatgagcttaaaaaaaaaacacaaaatgttttaagaaagtttatgaatttgtgttgggctgcattcaaagccatcctgggccgcctgtagcccatgagctgtgggttgaacaagtttgcattagaaagtgaagaagtgggggcaagcccagtgtcatggcttgacactggaagccagtggaaggtgcccaggaagagttgtggggaatgtccttagactggcatc

SEQ ID NO: 1098 - DNA, 30 bp, Homo sapiens
  source 1..30: mol_type = genomic DNA
gcagtgctcacggaggctggagattacaca

SEQ ID NO: 1099 - DNA, 41 bp, Homo sapiens
  source 1..41: mol_type = genomic DNA
gtactcagcacccatttaacttacgggccagccctcctcat

SEQ ID NO: 1100 - DNA, 219 bp, Homo sapiens
  source 1..219: mol_type = genomic DNA
tgtgggcagcagttacaccaagctcctgagaacaagggcaaccttaacttcgaaccctggggttaaaatctgtgtgattttttaaaatcagggtttctaagcattttataagcctcagtttcttcactgaagcataaagatagtaaccttggtctcctgtgatgactgcgaagattgagttactctttgtaaagctcttataccatggatgacatagta

SEQ ID NO: 1101 - DNA, 67 bp, Homo sapiens
  source 1..67: mol_type = genomic DNA
aaggctgtgtatccccccgtgagaccgtcgctgtacctcccgctgtgggacgccctatcctacttaa

SEQ ID NO: 1102 - DNA, 790 bp, Homo sapiens
  source 1..790: mol_type = genomic DNA
gactgtgtggtccttacggaatccacgtaggaaaagctgctgagctggaatcgggagactagcttctgcccgtgcttcaccagcagctgggcctgaacttcctgggtcactgctcccccttttccatcagccttcctgtcctattttgaagaaaggtgaaagctgtttggaactgaaactgtagcccttggattcacattggttttacctctgctatcactattttagagaaaaggtagtgactggtacactaaagaaactacatttatttaatgtaactaaatttaatttaatgaaataaacatttgcttggtgcctcattcattgctagacttcaactattttagaatacaatttatttactctttttttttcttgagacagggtcttgcttggtggctgtggctggaatgcggtggcacaatcatggctcactgcagccttgaactcctgggctgaagcaatcctccggcctcagcctcttgagtagctgggattacaggagggcaccaccacgcccagctacatttttaagttttttgtagatgtgggtctcactatgttgcccaggctgctctcaaactcctggcctcaagtgatgcacctgctgcggcctcccaaagtgctgggattacaggcgtgagcccctgcgccccatccatttcctctgttaatcagttcttaggattataacgattgctccctcatcaccatgccctgcatttccctgagtttccttcctgggcagtggagacgtaagcacagagcagtgtcacatggcatctgtttc

SEQ ID NO: 1103 - DNA, 27 bp, Homo sapiens
  source 1..27: mol_type = genomic DNA
ccagtcaggtcgcgtcagcccgtcaac

SEQ ID NO: 1104 - DNA, 85 bp, Homo sapiens
  source 1..85: mol_type = genomic DNA
gcggccagtcctacgggcttgtcctgtatgagaagtccatctgctccggaggccgcctccgtgcccacgctcatgacgtggcaca

SEQ ID NO: 1105 - DNA, 68 bp, Homo sapiens
  source 1..68: mol_type = genomic DNA
gtttttggatgagacaatgatagggattctgaatgagaataataaggacctgcacattcctgaactca

SEQ ID NO: 1106 - DNA, 47 bp, Homo sapiens
  source 1..47: mol_type = genomic DNA
cctggtggagaatcaaggacgagtcaatttttcatggcaaatacaga

SEQ ID NO: 1107 - DNA, 49 bp, Homo sapiens
  source 1..49: mol_type = genomic DNA
tgtcagcatcaataactcttccctggagggctttaccatctattccctg

SEQ ID NO: 1108 - DNA, 25 bp, Homo sapiens
  source 1..25: mol_type = genomic DNA
cagggcccggccttctactgtggga

SEQ ID NO: 1109 - DNA, 109 bp, Homo sapiens
  source 1..109: mol_type = genomic DNA
ttatggatttgtgttcatcaatggacgtaaccttgggcgatattggaatattgggcctcagaaaacactgtaccttcctggagtttggcttcatccagaagacaatgag

SEQ ID NO: 1110 - DNA, 34 bp, Homo sapiens
  source 1..34: mol_type = genomic DNA
aagatgatgagtggctcagatatcaaatctacag

SEQ ID NO: 1111 - DNA, 301 bp, Homo sapiens
  source 1..301: mol_type = genomic DNA
ccactcccggccgtgaacatattttttgggttgctggagttcatctataagtcatttttgaggaataagatttatgttaagactatcaaacacagtgttgcctacaatagcaaaaatgtgaaaataacaacaacaacaaaacagcagaggaattgttatgtattttgtagtctatctatatgatgcctatttttaggctttaaaaagtcttcaaaatctttaatgactgatttatctagttaaatgcttaatccttagcaggctcttattctttaattaaacgtgcctttgagtagatgtg

SEQ ID NO: 1112 - DNA, 229 bp, Homo sapiens
  source 1..229: mol_type = genomic DNA
ggtcaccgaagcttctctgaaaatgtgacatctctgaggaaggtggaacattaatcatctctagcagtgcataggccctctctatggcattgtcaactaagcactaataatagtcaggggacaacatgcagcgatagccaagagcatggatcttggagccaaagagatcaggttttaatctcagctctgcagcgctagccatgcgctagcttcatgcaggcttccttca

SEQ ID NO: 1113 - DNA, 25 bp, Homo sapiens
  source 1..25: mol_type = genomic DNA
ccactatcaccaccatcaccatcaa

SEQ ID NO: 1114 - DNA, 29 bp, Homo sapiens
  source 1..29: mol_type = genomic DNA
tgagatctcataaactttcagatcaaaat

SEQ ID NO: 1115 - DNA, 143 bp, Homo sapiens
  source 1..143: mol_type = genomic DNA
agccgcgagccccagccaatgagcgccggcgggccggttgcccaggcgaccagtgcgcggctccgccccccgcggcgaggctcccgcgcgcggctgagtgcggactggagtgggaacccgggtccccgcgcttagagaacacg

SEQ ID NO: 1116 - DNA, 72 bp, Homo sapiens
  source 1..72: mol_type = genomic DNA
cacgtggagcctccggcggaggccggcccgcacgctgggactcctgctgctggtcgtcttgggcttcctggt

SEQ ID NO: 1117 - DNA, 71 bp, Homo sapiens
  source 1..71: mol_type = genomic DNA
ccctccagccgtcagagccctctcagacgcaccccatcgcggccccgtccccactgctccgcggagagctc

SEQ ID NO: 1118 - DNA, 26 bp, Homo sapiens
  source 1..26: mol_type = genomic DNA
cctctgggaggcgccttattccgcag

SEQ ID NO: 1119 - DNA, 79 bp, Homo sapiens
  source 1..79: mol_type = genomic DNA
tgaccctatctttcaggtcagcactttccatattcaaaacctccagtgggaagccgaccggcagtatcgaatgaactga

SEQ ID NO: 1120 - DNA, 30 bp, Homo sapiens
  source 1..30: mol_type = genomic DNA
caggtagaacagaagctcaaggagctctga

SEQ ID NO: 1121 - DNA, 103 bp, Homo sapiens
  source 1..103: mol_type = genomic DNA
cggcggtcatcgtactccggatgttcacggcactccggatgttctgctgtgcccggttgcatggatcctggcctatctgtgtctggtcatactctgcatggca

SEQ ID NO: 1122 - DNA, 42 bp, Homo sapiens
  source 1..42: mol_type = genomic DNA
tgccgagaggcgctttctcgcggaccggagccttcgacggcc

SEQ ID NO: 1123 - DNA, 46 bp, Homo sapiens
  source 1..46: mol_type = genomic DNA
tgaagacctggaatcgggtggatgggtggacgccgccaacgcagac

SEQ ID NO: 1124 - DNA, 80 bp, Homo sapiens
  source 1..80: mol_type = genomic DNA
tctctgctcctgcggtcgggcggctgcgaccgtgccggggctcggaggtaccgtgtgaagtcgctgtcgcgcgtggccgc

SEQ ID NO: 1125 - DNA, 41 bp, Homo sapiens
  source 1..41: mol_type = genomic DNA
cctccatgccgagtgctgtgcttgctgccggctgcagcctc

SEQ ID NO: 1126 - DNA, 105 bp, Homo sapiens
  source 1..105: mol_type = genomic DNA
ggcggaggggagcttttcccagccacctggacgcaggcgccctcgagagagaaatgccgaggacctgcgaaggggcgaggaagccgatctctctgcggcccggag

SEQ ID NO: 1127 - DNA, 177 bp, Homo sapiens
  source 1..177: mol_type = genomic DNA
tccctctgcggctccgccatcgacagctggggctgcaggccaagggctggaacttcatgctggaggattccaccttctggatcttcgggggctccatccactatttccgtgtgcccagggagtactggagggaccgcctgctgaagatgaaggcctgtggcttgaacaccctcacca

SEQ ID NO: 1128 - DNA, 66 bp, Homo sapiens; identical to SEQ ID NO: 1073
  source 1..66: mol_type = genomic DNA

SEQ ID NO: 1129 - DNA, 25 bp, Homo sapiens
  source 1..25: mol_type = genomic DNA
caccgacctggtgtgggagtccccg

SEQ ID NO: 1130 - DNA, 49 bp, Homo sapiens; identical to SEQ ID NO: 1076
  source 1..49: mol_type = genomic DNA

SEQ ID NO: 1131 - DNA, 92 bp, Homo sapiens
  source 1..92: mol_type = genomic DNA
ccttcgtcctgatggccgcagagatcgggctgtgggtgattctgcgtccaggcccctacatctgcagtgagatggacctcgggggcttgccc

SEQ ID NO: 1132 - DNA, 174 bp, Homo sapiens
  source 1..174: mol_type = genomic DNA
ggcaaaaagctcacagacataggtctggtttgtttctgtgttccagttcccattctgtactgaattgtgttccagttcccattctgtactgaatttccttttcaggaaaagcagcacccagaggggatcgctttcagtgatgctgcagtgagtgccctcacgtagccatgcatg

SEQ ID NO: 1133 - DNA, 60 bp, Homo sapiens
  source 1..60: mol_type = genomic DNA
ggggcatagcttctgtctccactacccagggccacttctcaggcactgatccatccagcc

SEQ ID NO: 1134 - DNA, 442 bp, Homo sapiens
  source 1..442: mol_type = genomic DNA
cctgaccctgtttaggacttccagaccagggcaagaggagcctcagagccttttgttagaaaatatgtgtcttctcagaacctgaagtgagaaggaagagccctgactccagctttggaaccaatccacgctgctgtgttcctctggggagtttgggatcatagcaacagggtggagggagaattcaactcttgctcacctgctgctctgggctgtgcgccactgatgccaaggcgttagccacgttggcaaggatggggactgcctcctgctcagcccctcgcagtctctgtcaggcttgttttttggggtgacgctagaaggttgtgtctcctccttccacagcctcagtgattcctaacccttttgacttcactttttgaaatgggatcacagagcaagttgttgaaaactaggcctggagtcctgtgaaaagcttttc

SEQ ID NO: 1135 - DNA, 53 bp, Homo sapiens
  source 1..53: mol_type = genomic DNA
ggacaacttacaagggcttcaccgaagcagtggacctttattttgaccacctg

SEQ ID NO: 1136 - DNA, 92 bp, Homo sapiens
  source 1..92: mol_type = genomic DNA
acaagcgtgggggacctatcattgccgtgcaggtggagaatgaatatggttcctataataaagaccccgcatacatgccctacgtcaagaag

SEQ ID NO: 1137 - DNA, 67 bp, Homo sapiens
  source 1..67: mol_type = genomic DNA
accgtggcattgtggaactgctcctgacttcagacaacaaggatgggctgagcaaggggattgtcca

SEQ ID NO: 1138 - DNA, 72 bp, Homo sapiens
  source 1..72: mol_type = genomic DNA
gtaactgcacttgtgttgggccgtgggggctggcggcggccctgggctggctgtgcacgctcccgctgtggg

SEQ ID NO: 1139 - DNA, 313 bp, Homo sapiens
  source 1..313: mol_type = genomic DNA
tgttctcagcatatcagcctccgtgtgcctctgaaaatgtcgtccagattaccctatcctgctgaacgccaggcatctctgtcacactcagagtgaagcgcaggttctgggaatgacctcgaaaggcctctccacttggcctccaggacctagctgagctcacctcctgctccttccctttgctcacaccgtttcaccctctttactgttcctccaacatccagatccccagcctggggggctttgctcttcttccagagagctacatggctgttctccgaagttagcgaggctttctgtagcaccacacttg

SEQ ID NO: 1140 - DNA, 55 bp, Homo sapiens
  source 1..55: mol_type = genomic DNA
gtagtttatttatgtcattcatctgtttcacccagcagtactcttggcggggctt

SEQ ID NO: 1141 - DNA, 137 bp, Homo sapiens
  source 1..137: mol_type = genomic DNA
agcagcgcctagctggcacccagggagtgaaggtccatgaatggcgaggaaaaggcttttgtccccaggcagagtcagtcaaggacccagacctcgtgtctccggcatggggaggaccagcagtgatccccacggct

SEQ ID NO: 1142 - DNA, 906 bp, Homo sapiens
  source 1..906: mol_type = genomic DNA
ctcccggtttcaggccttgcaaggaagcccgggagccgccactgcttttccctgtggccctcccacctccaggcacccacctgcgtgcccctgttgccacctgctgcccggaataacttcttttttttttttttaattaaaaaaattaaatggtctaaaagtgaaataatcgaaaatgttggtagagaaatacagtgttgcctactcttcgttacattctccagaaatgaccattttcaactctttgactttttctttggatattttccttcttatttccaaatactgtgaacatacagccctgcatcgtttgctttaaaagttctgcctattggccgggcagtggctcaggcctgtcatcccagcgctgtgggaggccgaggcgggcggatcatgaggtcaggagatcgagaccagcctgcccaacatggcgaaaccctgtctctactgaaaatacaaaaaattagccgggtgtggtggcgggcacctgtagtcccagctactcgggagctgaggcaggagaatccgtgaacccgggtggcggagtttgcagtgagccgagattgcaccactgcactccagcctggacgacagagcaagactccgtctcaaaaaaaaaacaaaaaacaaaaaacattatccgagcgtggtggcgggtgcctgtaatcccagctacttgggaggctgaggcaggagaattgcttgaatgtgagaggcagaggttgcagtgagccccgatggtacccctgcactctagcctgggtgacaagagcaaaactccgttaaaaaaaaaaattctgcctattgacttcttgttccagtaggtgatgagtgttctttcctgccagcatggctgttcagccctgataggcgccagcgtgggcctcgcggatgtgtatgacaacg

SEQ ID NO: 1143 - DNA, 82 bp, Homo sapiens
  source 1..82: mol_type = genomic DNA
ctgcttggctgcatcccgcgtggaatcctgcttcctggagttccaggaaacaggatgtttcttggtgctccgtggcttcccg

SEQ ID NO: 1144 - DNA, 116 bp, Homo sapiens
  source 1..116: mol_type = genomic DNA
actccggctcccgagcgtttcctgggtcttcttcctcctcgcccccggccaagttcctcagggagcccgccctccccttctcgtgctgctgcgcatccggggagcggcccagttac

SEQ ID NO: 1145 - DNA, 28 bp, Homo sapiens
  source 1..28: mol_type = genomic DNA
cagctcgggcccagggttctcaggcagg

SEQ ID NO: 1146 - DNA, 71 bp, Homo sapiens
  source 1..71: mol_type = genomic DNA
tcttggccaccatcaacttgcagtcaacacacgagctgcagctactgaccacctttctcttcaacgtccag

SEQ ID NO: 1147 - DNA, 337 bp, Homo sapiens
  source 1..337: mol_type = genomic DNA
ctgctcagcggcctatgggaattctgaatgcctgtcagcgtgctcagcttccccagcgcagggagctggactcagggctgatggcctctggccccccgcccatgccactgtgtgcctgcaaggcccgctgcccagaaacacctctgagggctgctgtgtaggctgatgcagtgtggacatcacccactgccctgagagaggggcccttttggtgcactcctagaggactcgacttttgtggcctcaactagctccagacttgctcccagggattgaggggggaaggaaaaacttccctgtcctatactacacaggcatccgaccttaacctgtgagg

SEQ ID NO: 1148 - DNA, 65 bp, Homo sapiens
  source 1..65: mol_type = genomic DNA
ctctgggcttctgcaaacgtggcagagtggagcatggtcccaggaatgatcttggcctccttggg

SEQ ID NO: 1149 - DNA, 27 bp, Homo sapiens
  source 1..27: mol_type = genomic DNA
cagaacctgcaccatgaatagctgtgc

SEQ ID NO: 1150 - DNA, 38 bp, Homo sapiens
  source 1..38: mol_type = genomic DNA
aactggtgtgcaggcgaatttggccctcacctatgccc

SEQ ID NO: 1151 - DNA, 56 bp, Homo sapiens
  source 1..56: mol_type = genomic DNA
actggacggggtggtttgactcgtggggaggccctcacaatatcttggattcttct

SEQ ID NO: 1152 - DNA, 105 bp, Homo sapiens
  source 1..105: mol_type = genomic DNA
gttttgaaaaccgtgtctgccattgtggacgccggctcctccatcaacctctacatgttccacggaggcaccaactttggcttcatgaatggagccatgcacttc

SEQ ID NO: 1153 - DNA, 27 bp, Homo sapiens
  source 1..27: mol_type = genomic DNA
cttcgtgtctttggcaatagagtacct

SEQ ID NO: 1154 - DNA, 28 bp, Homo sapiens
  source 1..28: mol_type = genomic DNA
cagtcatgttacactcccagaggaggga

SEQ ID NO: 1155 - DNA, 73 bp, Homo sapiens
  source 1..73: mol_type = genomic DNA
atgctgtgctgacagaagccggcgattacacggccaagtacatgaagcttcgagacttcttcggctccatctc

SEQ ID NO: 1156 - DNA, 78 bp, Homo sapiens
  source 1..78: mol_type = genomic DNA
tctcagacccctaaagagttacttccttactgtcccacctcgaccccagttgatctgcgtgcaagaatatcctagaca

SEQ ID NO: 1157 - DNA, 38 bp, Homo sapiens
  source 1..38: mol_type = genomic DNA
accttcttcccaagatgccgtatgagcccttaacgcca

SEQ ID NO: 1158 - DNA, 26 bp, Homo sapiens
  source 1..26: mol_type = genomic DNA
ctctgtgggacgccctcaagtacctg

SEQ ID NO: 1159 - DNA, 27 bp, Homo sapiens
  source 1..27: mol_type = genomic DNA
gtgagtgctgtgggcagtcatcgggag

SEQ ID NO: 1160 - DNA, 102 bp, Homo sapiens
  source 1..102: mol_type = genomic DNA
aacctgccagtcaatgggggaaatggacagtccttcgggtacattctctatgagaccagcatcacctcgtctggcatcctcagtggccacgtgcatgatcgg

SEQ ID NO: 1161 - DNA, 36 bp, Homo sapiens
  source 1..36: mol_type = genomic DNA
gtaggagcttctcttctaaattcctgtgaccttctg

SEQ ID NO: 1162 - DNA, 62 bp, Homo sapiens
  source 1..62: mol_type = genomic DNA
gtgtttgtgaacacagtatccataggattcttggactacaagacaacgaagattgctgtccc

SEQ ID NO: 1163 - DNA, 78 bp, Homo sapiens
  source 1..78: mol_type = genomic DNA
ggttacaccgtgctgaggatcttggtggagaatcgtgggcgagtcaactatggggagaatattgatgaccagcgcaaa

SEQ ID NO: 1164 - DNA, 26 bp, Homo sapiens
  source 1..26: mol_type = genomic DNA
aatctagctaaatgtgggtggtttca

SEQ ID NO: 1165 - DNA, 43 bp, Homo sapiens
  source 1..43: mol_type = genomic DNA
ttaattggaaatctctatctgaatgattcacccctgaaaaact

SEQ ID NO: 1166 - DNA, 38 bp, Homo sapiens
  source 1..38: mol_type = genomic DNA
ctggcccgcacccaggtgtgaacgcctccaggggccag

SEQ ID NO: 1167 - DNA, 35 bp, Homo sapiens
  source 1..35: mol_type = genomic DNA
gttcggcctggacaaatggagttccctcccagaaa

SEQ ID NO: 1168 - DNA, 26 bp, Homo sapiens
  source 1..26: mol_type = genomic DNA
atgaacacccttcccctctgtttcaa

SEQ ID NO: 1169 - DNA, 60 bp, Homo sapiens
  source 1..60: mol_type = genomic DNA
tggccagaaccttggacgttactggaacattggaccccagaagacgctttacctcccagg

SEQ ID NO: 1170 - DNA, 48 bp, Homo sapiens
  source 1..48: mol_type = genomic DNA
cctgttccccatgacgccctgcccacctgccgtcccagggagccttcg

SEQ ID NO: 1171 - DNA, 42 bp, Homo sapiens
  source 1..42: mol_type = genomic DNA
gacagacgtcagctgccctcccagccgggccctctctccaca

SEQ ID NO: 1172 - DNA, 82 bp, Homo sapiens
  source 1..82: mol_type = genomic DNA
tcatcgtttttgaggagacgatggcgggccctgcattacagttcacggaaaccccccacctgggcaggaaccagtacattaa

SEQ ID NO: 1173 - DNA, 119 bp, Homo sapiens
  source 1..119: mol_type = genomic DNA
tgccagtgggagactgccgcctcctcttgacctgaagcctggtggctgctgccccacccctcactgcaaaagcatctccttaagtagcaacctcagggactgggggctacagtctgccc

SEQ ID NO: 1174 - DNA, 71 bp, Homo sapiens
  source 1..71: mol_type = genomic DNA
ccctgctcttgtgccgaggctgtcgggctgtctctagggtgggagcagctaatcagatcgcccagcctttg

SEQ ID NO: 1175 - DNA, 260 bp, Homo sapiens
  source 1..260: mol_type = genomic DNA
aaaagtgctgaaacgtgcccttgcactggacgtcacagccctgcgagcatctgctggactcaggcgtgctctttgctggttcctgggaggcttggccacatccctcatggccccattttatccccgaaatcctgggtgtgtcaccagtgtagagggtggggaaggggtgtctcacctgagctgactttgttcttccttcacaaccttctgagccttctttgggattctggaaggaactcggcgtgagaaacatgtgactt

SEQ ID NO: 1176 - DNA, 43 bp, Homo sapiens
  source 1..43: mol_type = genomic DNA
gaaatcctcaccctgcgtcttcccaagttagcaggtgtctctg

SEQ ID NO: 1177 - DNA, 28 bp, Homo sapiens
  source 1..28: mol_type = genomic DNA
gtgagtcctggcagaagccatggcccat

SEQ ID NO: 1178 - DNA, 60 bp, Homo sapiens
  source 1..60: mol_type = genomic DNA
cccagctcacatgtgagtcctggcagaagccatggcccatgtctgcacatccagggagga

SEQ ID NO: 1179 - DNA, 28 bp, Homo sapiens
  source 1..28: mol_type = genomic DNA
gtgagtcctggcagaagccatggcccat

SEQ ID NO: 1180 - DNA, 39 bp, Homo sapiens
  source 1..39: mol_type = genomic DNA
tctgcacatccagggaggaggacagaaggcccagctcac

SEQ ID NO: 1181 - DNA, 28 bp, Homo sapiens
  source 1..28: mol_type = genomic DNA
gtgagtcctggcagaagccatggcccat

SEQ ID NO: 1182 - DNA, 40 bp, Homo sapiens
  source 1..40: mol_type = genomic DNA
tctgcacatccagggaggaggacagaaggcccagctcaca

SEQ ID NO: 1183 - DNA, 115 bp, Homo sapiens
  source 1..115: mol_type = genomic DNA
agagcagccctccttcgaagtgtgtccaagtccgcatttgagccttgttctggggcccagcccaacacctggcttgggctcactgtcctgagttgcagtaaagctataaccttga

SEQ ID NO: 1184 - DNA, 111 bp, Homo sapiens
  source 1..111: mol_type = genomic DNA
agctgtgtatgagctggttccgtcagaaagtgatggaatggaagggaaccttcctgcaaatcctcctgtaaggtggagaagccccttggatcacacttccacgcagacctg

SEQ ID NO: 1185 - DNA, 140 bp, Homo sapiens
  source 1..140: mol_type = genomic DNA
agcaggctgagcaacgcttgttccgcctggtggagagttcgttcttcttgggcccggggagctgcatgtcagggtgttgctgcttcgctcaagggtcacttatcacggaggcctctgtggtcaccctacagagcactgac

SEQ ID NO: 1186 - DNA, 50 bp, Homo sapiens
  source 1..50: mol_type = genomic DNA
tgatgttttcttgctagtgccacctcttatgaatcccattgtatattgtg

SEQ ID NO: 1187 - DNA, 29 bp, Homo sapiens
  source 1..29: mol_type = genomic DNA
cttctatgcgcccgtcattgctttggcat

SEQ ID NO: 1188 - DNA, 148 bp, Homo sapiens
  source 1..148: mol_type = genomic DNA
aagctggcctgctccgacaacactgtcaacttcttctatggtttctttcttgccctctgtatgatgtcagaaagtgtgttcattactgtgtcttatgtgctcatcctgaagacgatcatgggaattggatcccatagggagcggctca

SEQ ID NO: 1189 - DNA, 89 bp, Homo sapiens
  source 1..89: mol_type = genomic DNA
tgctgttagtactcccatttcctttcactcttacaaggttgacatattgtaggaaaagcctactctctcattcctattgtctccatcag

SEQ ID NO: 1190 - DNA, 93 bp, Homo sapiens
  source 1..93: mol_type = genomic DNA
ttttgaccggttttggccatatgccaccctctgaggtacatatctgaggtactggtgagctgtatcctcaccagtgccagagttgccaaaatg

SEQ ID NO: 1191 - DNA, 284 bp, Homo sapiens
  source 1..284: mol_type = genomic DNA
tggagcatgcccatatatggatatctgtccccatctgcctcatgtacttggtagccatcctaggcaattgcacaatcctctttgttatcaggactgagccctcactccatgcacccatgtactatttcctttccatgttggctgtctctgatctgggcctgtccctctcctacctacccactatgctgaggatctttgtattcaatgccacaggaatctcctcaaatgctcgctttgctcaagaattctttattcatggattcacagatatggagtcctcagtg

SEQ ID NO: 1192 - DNA, 39 bp, Homo sapiens
  source 1..39: mol_type = genomic DNA
aagctgcagaaccaacgaggtggccgaatcttccttcag

SEQ ID NO: 1193 - DNA, 346 bp, Homo sapiens
  source 1..346: mol_type = genomic DNA
aggtgctggtcatcattctgtcccattttttgccactgtgctaaggcttttgactcaaccaagaaaagggccggtcttccagcctggccctgcaagagtgtcctagtgcttcaggtagtggatgggcatcgtcattcgtcccaccttcctgccccctaaagccccaggaggacacactctcagcatcaggccagctctccgggtcactggggcttggctcaacaggatgtgcagggcagagccgggagggaagagcagaagatgccatgggctgttcgcaggagcagccgtccagggcgccgctggaggaagatcttctagtggctgtctcagcacgtacaaagaa

SEQ ID NO: 1194 - DNA, 192 bp, Homo sapiens
  source 1..192: mol_type = genomic DNA
cagagcttcatgacggcctcggattggcagtcaacccagggatacagaaatgtaaacaaaaacagagcttccagataacattactgtgtgctatgtgactttcagaatacagcagcgtcccagacactctaaagtcaagtgaaacaagagattttagaatcaatctatacacatttcagagggcagtccagg

SEQ ID NO: 1195 - DNA, 1103 bp, Homo sapiens
  source 1..1103: mol_type = genomic DNA
tcttctctccagctaggtgcacttgaggttgttcataaatgtaaaattatgtcaggtttctaacatgggacactgcacacagttgtctgacctgatgaaccatcccatttgaaagtatagattattattatttcttgtagtatttggttgttttccatctcattcatgaacaactcaacctgatagtagtatccaataaatgcctttcagggctcaggaatgaattgacatcctagttaagaaatgagacttaataatggagactgaatgaggcggtttgtattaaattatatgccatgaagtgttcattttagctttaacctaattatgactgtaccaccatgaagtacagaatgaaaaattatatatatgggggggaaacagaatgaatatctgattcttttgaatgcttgtggaaatctttgagatcgtgcagggcataccacaaaatagcctttagaacagatacccaattttacagttcataggacaacatcaaacattagtaagtctaaataagatgaatagaatttttgttatgtaaattttgctagaacagtctattttcttgcacccctcaagttaacctcttaaaaaaatgaatgtataatttctaccgaaagaatatcagagagaatctctctggcctatagtgttaaaatattgttcacaaatcctgattagttaagtgcatacattatgaaacttacagaataaaacttattatacatctctttcttaaattaatatctttacacattttcaactggctccccaagtctgataaggaaggattaaaagaaaaaagaaatgtattagttgggtggccaaggagtttcctttgtaatgttgagagacttccgctttctgaatttcgctggttctctaaggtaaaagagttaaatagtacccttgttcaccaaggaaagtgatccaaactatatatctagtgcagatatttcctttgcattatttagtcttctctggagagaaaatacagtttccccttcctctttctcttcacatttactcttttcaacccaaaataagagacatagaaagcaaaccacagccagtttggcatcttctcagtgctactagta

SEQ ID NO: 1196 - DNA, 36 bp, Homo sapiens
  source 1..36: mol_type = genomic DNA
tgacttgtaacccttcagtggaatgggaaatttctg

SEQ ID NO: 1197 - DNA, 649 bp, Homo sapiens
  source 1..649: mol_type = genomic DNA
tggcttagttagcagacctagaatctgcccaggtgagacctagaacaaaaatagctggggtgaaatggataagagaggtagaggtatatgtcaaggcagagccctatgaggaaggaagagttttcaaagaatatgaggaacatagtgctgagagtgtggctgccttcagcaccgtacacctaatctagagaaaatatttcccatgtgggaggtcctgtctgcattcagtccacccttttctgcctgcttcttcctccaagtgcctcaacctctacatgctcactctcctccccttccctcagcccatcttggtctaagcagctttcacaatccaaaccaaacatcaccagccacccgctgataagtcaccagcatttactttcctgagttactttttctccattcattgagactatggattcatcccaactccttctaaatccctcaaccatccagctatattttggctaacctttgccctagacactctaccagatgttaatgcagtatcaagtgtaaattgtgtcaccctattctgttctacccttttccctgctgccgaaatatcttgctctcctctacctcatccccaaagagcctataaattcagagtatccaaccttttcatggattcactcactgttgttca

SEQ ID NO: 1198 - DNA, 3484 bp, Homo sapiens
  source 1..3484: mol_type = genomic DNA
cgctgttgaaccaagctgctcactggacacatatttgtgtccccaggagattatttgtcaggcactgttttttatttgtttgtttgttcatttattgttgttttactgctattggcgataacatgaaatgtgatacagctattgcccataatttaatgtgaaattaatcatgatgaattctatagcatgctactgaaatgccaaattcagctattttctttctcttctaaaatggaagtttcagttttccatatcagatgtatataagtggaattataacacaatcctatcactgacagtaatcctcagtcaccttaaataatcagtgctcacagtgctgcttacagttcatttagttggcacatataaacctgtacccacacaagactgaccaaaaattttctttgcacatttttcctttctcatagtttttttctatatttcgttaagcaaaggaaggttaatatgcctatttttcctgttaggcttttagaaattattttccatgacttttgttcttataataggttagacagtttatttttcaaaggtaaaaattgtgtttctatgcattaatgtgattgaactacaaaaacagagtgcaatatgttcaaaaaatactcaactaaactttccccctgtcatatcactgcaaaagtgtccttttaaacagagccataaagaaatttttttcaaatttctttattgcacaggcttttttcagttttacctttctgggattgaacaatgttcctttcataatgccaaagcattcccttccccagaaaaatctccttggacaactggtttaaaaacgttattaagtcataggggaggaataagcggccaaaaagtcacatttttgcattggtttacgttgcttgattagactatcttcagagagcacattatgtgtttatagctttaatttgtattatgtcaatgaaccagtgaagtgcctaaagagatgcttacaactatccagtaggacacaactgcactgctttttaaacactttttggttagttaagggtgacttgaattgtacacatacatgctaatttttgaaaacttatccatttttcatagtaaataatatagataaaattttctgttagagttcccgcaaatatttcattttagacttacttgtgatataagatttaacttttcttttgtgaaagaatcgtgaactagtgtttcatgaaatcattttcctcttccatttatcatcctcctctggtacaatatattgggttgctttcttttagattttgttccagataggaaaacaaatatgactgtatacttattaacataaggtagttctgcatttttggattccaggatcctgtttgaaatcttccatgtgaggaaaaaattactaatatttttaaagacagggtggtttatttaaagagattattcagagaacttgtgccatatctcgtctgttttattgcatatgccatatgttaacttttattcaatattacattatgtagatatgtaatacaaagaaaatatttaggagaatggcaaaacacaaatggcaacataaatgtccatttgacttacctaacttcacaactttcaagttgaggatgtcatttattcttgaatttgtttttttactagatgctttcaattaatagccctatatttttgtgcaggcgaactgtataacaggataaaaaatgatttgtatgtattgaaaaggaggagaaattctcacagaacaccatatgagctttagaccaaaaggggaaacaaggtttaagtaactaaaatggccacttagtttgtgtttatttttttccctggaaatgtaagtagttggagtttaggctatggaaatattagtgcctttaatagatctctttccttgcaaagtttctttttagctcagcattgatctatcttatcaataggaaaataagttgacttggaactataaacaaaaacaacaccatatatttatgaacctcagtgaaccagcctagaaaaattgacttctgcaggtgctaaagcacctactaatacgcagcatgcacagcatttcaggttgtgaataccattttacaacgagtttgctgttaactctctttatccaatgcaaacttgaaattctgatgcggttttccagggtggtattttttcagagtattgaatttactatttagtaatttatagtatagctttttatattaaaatgtgatatttttaaaagagatatctggttcaattggtataatgacgtgattatgcaatatgctgatctacaccttgcgctcacattgtgccaaacttaaatgtgcaagtgtacgtgagaaaagcacatgtgaatgtgaattctttaattctttgcttattatgttaaaattagtcttcatagtccactgatgtgtatgcttgaataatgtctatttactttggaatttcaagatttccagcttcaatggtaatttataatttctcagatcaccttaagaaatattgagatactctcccacctgaaaataatctgttctttaacccacctgactatgggagtagccaggcaggtgcctcactggcttcttcagacgaggcttcctcaggtggatatatgactattaggggaaaagaggcttttgagacagcttattacctccttcccctttttgaactaagtacattgtctcagtcccagtatgaatttgtcccatttggggtatttttaaaataaaagatggctaacatggaatctggggcatagccttggcctttaattatggttgtaagcccaaataatggcagagaaacacagggctgtttttacaacagaaaactcaatataagttttatataagaatcctataaaatttgaaccagagctcctatttagttgttataatgtctcctaaagatcttaaatgcttctaaaagctaattattattccagagcaactttttccttttcccccttataaagtttttttttaaatccaaaatcttagatttctgtgccacagcaaaataaaatgatcaacaattaaagatctgtacttaaaatagtacaccatttttagtggagggagggtgcatgcctatatgatggtaagattcttttgaactctaaggacaattcctcatggaaaaaataaatttcagtgcatattataaaaatgatttgcactgtgttagcaaaataaggtgttttaggttgtattttaaagacaattctaaatcatttctctggaaagcaagaccttaaattcttctctttaatagaactgcttttatgcaaagagatggtcttaacatggactaaacagtacataacaataatgtttgttatgtaaatagtatatcacatttgcttagtagcacaattcaacagcaggctgaaagtcgtggctcctctgctcagattgagttttaagttacctaatttatgtaatcagaatctattctaggtggccgtcaacgtaaactgtgtttc

SEQ ID NO: 1199 - DNA, 200 bp, Homo sapiens
  source 1..200: mol_type = genomic DNA
ctagtgtcaaagtttagccgtttgtttttttttttttgttttttgcggctgtaatgtgcaatgatgtgttttattttccttgatgcttaacattactaacaattgcaaaaataatactgaggagcactactttgcattgtttgtagttggagttttggatactgatcataaatcatgaatctggcgtattaatgcttaac

SEQ ID NO: 1200 - DNA, 72 bp, Homo sapiens
  source 1..72: mol_type = genomic DNA
tacttttaatggaagcacgaatgcaagctgaacttctttatgctcttcgtgccataactcggcatttgacct

SEQ ID NO: 1201 - DNA, 362 bp, Homo sapiens
  source 1..362: mol_type = genomic DNA
tatggcttcagtacctaacagattttttgaagtcttagagccactcacatcaggtaaatacccattttacatccagcatttccccttgatgggtctttatcccatatttatatgtttgctctagattttcttccttttctagattgtatctagaaattctctttactcttcaggagaatatatccaaccacatatccaactggtataaatatatcaaaagaatataatattaaaacatatttttatagtaaattttgaaaacttgtggatacccattttaacttatcagccgagatgtaaccccgaaagaaatgttctgcagaattttatctgaaagactctagggaagctatgtatgtcta

SEQ ID NO: 1202 - DNA, 33 bp, Homo sapiens
  source 1..33: mol_type = genomic DNA
gtacgtgtttcagtattaagcattataccatag

SEQ ID NO: 1203 - DNA, 100 bp, Homo sapiens
  source 1..100: mol_type = genomic DNA
gaagcctgaaggtttacattaagacagtgacctgctatcctgagagaactacaaaacgcatgtatgatagttactggcggcagttcaaacactcagaaaa

SEQ ID NO: 1204 - DNA, 146 bp, Homo sapiens
  source 1..146: mol_type = genomic DNA
ggttctccctggtgaacagactttattctgacattggacatcttcttgatgaaaagtttcggatggtctacaatctcacatataacactatggccacccatgaggatgttgacacaaccatgctgcgcagagctttatttaactat

SEQ ID NO: 1205 - DNA, 109 bp, Homo sapiens
  source 1..109: mol_type = genomic DNA
tgacatgattataacatctgatgtctctcgatatattgaagaccctggttttgggtatgaagactttgccagacgaggagaagagcatttgccaacattccgagctcag

SEQ ID NO: 1206 - DNA, 218 bp, Homo sapiens
  source 1..218: mol_type = genomic DNA
cagtggtgttagtaagatacagttaatttatttcttaaatggatatttcttcctgtattaatgaaacaaaaaatagatagtaagtgtgtagtatagtacttggtatatggtaagtactcagtaaacaccgtctcttttctttatatgtaatgaagtttgttaagaattttaataagatttatctgaaattgggtaaccggagcacttaatctttcctg

SEQ ID NO: 1207 - DNA, 400 bp, Homo sapiens
  source 1..400: mol_type = genomic DNA
ttgaccagcgttataaagtattccagattctatgtaaggattctaagaatagtttttcaagtcttttgaagaaaataaatgtttaaagtattctacaggggtcatattctgtagcttggtaacagggttaactagcttttactgttttttgtattttcagttacgcattccattactgcaacagaatgtttcccgtattatgtcagtaactacttcttaggggcagaataatgcagataatgaacaaaatactatttcttttgagtacagactttgaaatatttgtttagatagaattaaagctagagttttagatttaataatcagaatgctaattttaacttcttaagataaatttaggaaaaaagtatttgtggattgagggacctttgtacatttc

SEQ ID NO: 1208 - DNA, 87 bp, Homo sapiens
  source 1..87: mol_type = genomic DNA
tttcagtctctaccttcttggaactttaagctgggactacagccttcaaaagtgaattttgactagaaagtcttggaccttagccaa

SEQ ID NO: 1209 - DNA, 116 bp, Homo sapiens
  source 1..116: mol_type = genomic DNA
ctcttctatcttaccctcatgctattgctttccctcaggctggttcatccttgaatgtatttcagattgagttgagagaaactttcagctttgtagttcatactctatcctggata

SEQ ID NO: 1210 - DNA, 116 bp, Homo sapiens
  source 1..116: mol_type = genomic DNA
ggattctctaagtgagctagaggccttaatggaaaggatgaaaagacttcaagaagaaagggaagatgaagaggcgtctcaagaagaaatgagcactcgttttgaaaaggagaaga

SEQ ID NO: 1211 - DNA, 208 bp, Homo sapiens
  source 1..208: mol_type = genomic DNA
tggtctctgcctgaactggtacatgctgtggtcctcctggcacattatcatgctttggcaagctttgtttttggtagtggtatcaatccagagagagatccagaaatctccaatggattcaggctaatatcagtcaacaatttctgcgtttgtgatcttgctaatgacaacaacatagagaatgcatctctttcaggcagcaactttg

SEQ ID NO: 1212 - DNA, 126 bp, Homo sapiens
  source 1..126: mol_type = genomic DNA
ttttaaagactggaggtattgctgagtggttgaatggtttggaatatgtgccacaaagactgaaaaatcttaatgaaattaataagctgctagcacatcgaccttggctgatcacaaaagagcaca

SEQ ID NO: 1213 - DNA, 166 bp, Homo sapiens
  source 1..166: mol_type = genomic DNA
gtgcttattttcctatgttcacataacaccttcctcacttattctttctcccttccaaaataggcatgtgtccttgtgtgtgtatagagctaagtataatttatggacataagaactgaagaagcctatggccttttggataccaagtgtcttgggtatatttgga

SEQ ID NO: 1214 - DNA, 103 bp, Homo sapiens
  source 1..103: mol_type = genomic DNA
gaatactctacatccggtcgtctggacaacatcacacaggtcatgagtttacacactcagtacctggagtctttcttgcggagccagttttacatgttgcgca

SEQ ID NO: 1215 - DNA, 88 bp, Homo sapiens
  source 1..88: mol_type = genomic DNA
tctgtttccagtatgagcaactgcataatttcagtgtctgttaatatcaaatgaatattcatttgcttcaatagtggcataatttatt

SEQ ID NO: 1216 - DNA, 30 bp, Homo sapiens
  source 1..30: mol_type = genomic DNA
gacaagaggaccaagtgcctttattccaga

SEQ ID NO: 1217 - DNA, 368 bp, Homo sapiens
  source 1..368: mol_type = genomic DNA
agtgagcgtgcccttgatacttttctggggactgtaatgtaagcagaaattgagacaagggtccttggaactggctgatagttttttttcttcctaatttgcccaaataggacaaataggttgattggttcagagcatttctgcaattacactaaaatgcttggttctgggattgagtaggtgtgaccatcaaatgaataactctgtggagcagtcatttaacatttcaaaaagttataaaaatgtctgaaaatgcaattttaaaaaagcaaaaccaaatgagtccagagcagcactgtccggtagaactgtctgcagtggaagatggaaatgtctgcgctgtcctgtagagtacacgtggtcctatg

SEQ ID NO: 1218 - DNA, 196 bp, Homo sapiens
  source 1..196: mol_type = genomic DNA
cggagaagagctagcgagttctctagataaaaaagattcaggaggcagttgcatgggttgctcattttcgtatcctgtgcccttattttttccttcatctgctccatcgtcttccctacaatatagtcaccataacaaatttgagtagaattttgttttgtgtaaagaatatggtagccatagaagagaacattga

SEQ ID NO: 1219 - DNA, 30 bp, Homo sapiens
  source 1..30: mol_type = genomic DNA
taaaaagtagtaatgttggccgcgcgtggt

SEQ ID NO: 1220 - DNA, 124 bp, Homo sapiens
  source 1..124: mol_type = genomic DNA
ccattatctaggttgcacatttgtgaaagcatcagtatatgatgcgttccatggttgggatctaatgatacccagatcaagccatgacataactagtgcagtgtgcaagattcaagccctattc

SEQ ID NO: 1221 - DNA, 109 bp, Homo sapiens
  source 1..109: mol_type = genomic DNA
aggtggtacctgatgcaggaatatgtgagtgttggtgttggagagtgttgtgagaggaagattattcagcagaaacaaacccttcctctgatgagcagaagtggtggat

SEQ ID NO: 1222 - DNA, 473 bp, Homo sapiens
  source 1..473: mol_type = genomic DNA
tggcgagatgtggttctgctatttattttaagttagaactcttattctgagagttttccatagaaacacagtaagatatgtggttaagttccagagtactgttaatattacaggtatgttcaggcatttgttaattagcctagaaacctaaccactgggtataacgtttccagaggaacatatatcctgaaattcaagtaaccgcttcactagagactgtctttcctaacttgtttactcagcattaaaaaggtaatgattttggcaaaaaaaaaaatatttttcaatatgtttactccaaggatgtgcttgtcggttgtgctgtgtctaataggaaaactgtgttaatgaagttccatccaatatttaggtaggagttgaatgaagaaagagataaagttgggtaataataagcagggtgttgggacaactgatggccaatatcaaactggcttatccttgttcactttgta

SEQ ID NO: 1223 - DNA, 552 bp, Homo sapiens
  source 1..552: mol_type = genomic DNA
aaagatcacatttacctcatgggtaactaaagctgggttttgtggaagatcattgtaattatctgaaactgtgactcttacttccttttttttttggagtctcactctgtcacccaggctggagtgcagtggcgccatcttggctcagtgaaaccaccgcctcccgggttcaagcgattctcctgcctcagcctcctaagtagctgggattacaagcacccaccaccatacccagctaattttttatattttttgtagagacggggtttcaccatgttggccacgctggcttcgaactcctgacctcaagtgatctgcctgccttggcctcccaaagtgctaggattaaaggcacgagccacccagcccggctgtgactcttactttcaaaacacattttataatatctataatgacaatagcttctactgaatactacttatgtgctaagcatttaaactctacatatgttatcacattcaagcatcacaattaacctgcgatgaattattactcacagtttatggataaagaaactagggctcacagggc

SEQ ID NO: 1224 - DNA, 297 bp, Homo sapiens
  source 1..297: mol_type = genomic DNA
tgtgcaggtcttgaattacaatttgttctgctatctttgtacagatatttgaatttttttttgttactgtgtcatgtatgagaaagattgtcattgattgtgaaggaactggctttttaaaaagaattccttccatatttacttaagttaaatgtttacttgtgagaacacaaatttattgttatcagtagttgtaactttattactaaaatacttgaaagttgcttggtatatttatatgctttatagttcaggttcaatagaagatttaatttgtaaaaagtgttctgctgcttc

SEQ ID NO: 1225 - DNA, 55 bp, Homo sapiens
  source 1..55: mol_type = genomic DNA
gtcggccgccgccaactacctgctctgtaccaactgccggaaagtgctgcggaag

SEQ ID NO: 1226 - DNA, 25 bp, Homo sapiens
  source 1..25: mol_type = genomic DNA
ccctccgcccgctctcgcctcggcg

SEQ ID NO: 1227 - DNA, 97 bp, Homo sapiens
  source 1..97: mol_type = genomic DNA
cgtctccgccgtcgctggggcagctgccgcggtggtcgcctctggcagtgccgctagctttcaggcagtcgcctctcctcccgacatcccgccttga

SEQ ID NO: 1228 - DNA, 160 bp, Homo sapiens
  source 1..160: mol_type = genomic DNA
gccagtaggcgatgcaagttatctctggggcccggaggacacgagtgaggaccgggcaccaatcaggttctcgctctgcgccggcctttgttctcactcgggagcaggttgcgggcgtctagcatcgggaacccgcattcgactcggacgcgcattgcta

SEQ ID NO: 1229 - DNA, 76 bp, Homo sapiens
  source 1..76: mol_type = genomic DNA
caggagggccccctgcgctaatctgccctggcagcagcgagctggcacgccctgggtgcatcatccggtgtgctct

SEQ ID NO: 1230 - DNA, 62 bp, Homo sapiens
  source 1..62: mol_type = genomic DNA
gacccgccgggccagatcccatctctggcgacgcggagaaaaatctggaagccgtcgtcgga

SEQ ID NO: 1231 - DNA, 26 bp, Homo sapiens
  source 1..26: mol_type = genomic DNA
ccgcgcggccggaactgcgggcgggg

SEQ ID NO: 1232 - DNA, 59 bp, Homo sapiens
  source 1..59: mol_type = genomic DNA
ggcgcccctgcggtgcagagcagctcagggccggctggtgcgcgaccccggaaagcggg

SEQ ID NO: 1233 - DNA, 34 bp, Homo sapiens
  source 1..34: mol_type = genomic DNA
agtccaatagccagtgaaggcctggtcctgccct

SEQ ID NO: 1234 - DNA, 31 bp, Homo sapiens
  source 1..31: mol_type = genomic DNA
gcctccaccatggacagaggccaggccctgc

SEQ ID NO: 1235 - DNA, 58 bp, Homo sapiens
  source 1..58: mol_type = genomic DNA
gccctgaaggcagacgggataatgtggttggccaaggcctgttggtccatccagagtg

SEQ ID NO: 1236 - DNA, 46 bp, Homo sapiens
  source 1..46: mol_type = genomic DNA
cccagggtcacgctcatgctggggctcccgtcagctgactattttg

SEQ ID NO: 1237 - DNA, 29 bp, Homo sapiens
  source 1..29: mol_type = genomic DNA
gtcaggtccagtcaagagggcccaaagtg

SEQ ID NO: 1238 - DNA, 80 bp, Homo sapiens
  source 1..80: mol_type = genomic DNA
ccaaccaatcttgggattctcccttcgtgcggttgtctgggacctttttccagggtcaaagcagatcgtgaggaggaagc

SEQ ID NO: 1239 - DNA, 177 bp, Homo sapiens
  source 1..177: mol_type = genomic DNA
atttggatgtggagcctctcctttccattgtgaactgaattctaccagcactgggcctggtgatgtctgcattaggcagatgaggaagcagtcttggagaggacaagggactggcctcaggtcacacatcaggcttgctagctcctggacaaagatgcctctgatagctcttccata

SEQ ID NO: 1240 - DNA, 408 bp, Homo sapiens
  source 1..408: mol_type = genomic DNA
cctgccctgggctacttactactgaggatgcacaaaggatcttcccaccacggactaggagacagtgcccttgtcctcatgttgttcacatactggtcggtgagggatgggtctgagtacatgataaatccctgggccccataagatttgactaggaggggtaagggcctggtgaactgctcagaaaataaactgtgttgtcagcaggaggacccctttctactatgagatattgcattccctgctaatcatacttgtgctctatctgttgatagaacaaatacataatgagaaacagccactgtgctttcagaagaacacacttgaaagaatttgttctcaataaattacatctgcatctggatccatatgaagaaatacgttcctctcattcaggcgtggctattt

SEQ ID NO: 1241 - DNA, 38 bp, Homo sapiens
  source 1..38: mol_type = genomic DNA
atggccaaagctcgacgggcggcctgcgtcagtggcgc

SEQ ID NO: 1242 - DNA, 76 bp, Homo sapiens
  source 1..76: mol_type = genomic DNA
ggctcggccggggagtcccagtggcggaggctacgaaacttgggggagtgcacagaagaacttcgggagcgcacgc

SEQ ID NO: 1243 - DNA, 47 bp, Homo sapiens
  source 1..47: mol_type = genomic DNA
gaccagggaccaggctgagactcggggcgccagtccgggcaggggca

SEQ ID NO: 1244 - DNA, 94 bp, Homo sapiens
  source 1..94: mol_type = genomic DNA
ttcccttcggggaacgtgcatctgtttttaggagcggtgcatgaaggagatgggtgtacgcgcgggcagagaggatgttgtagggccggcatgc

SEQ ID NO: 1245 - DNA, 76 bp, Homo sapiens
  source 1..76: mol_type = genomic DNA
tgttggagtcttggggcggtgctgcctagaggatacctcccaaccattccagctccagatgctgatcatccctatg

SEQ ID NO: 1246 - DNA, 68 bp, Homo sapiens
  source 1..68: mol_type = genomic DNA
tgaggcttgttcagcagaacaggtgcaagccacattgttgccaagacctgcctgaagccggattctcc

SEQ ID NO: 1247 - DNA, 57 bp, Homo sapiens
  source 1..57: mol_type = genomic DNA
tgtcctagtgcaggcagatgtggccaccctcacctctcgcagggtgctgcatgcctg

SEQ ID NO: 1248 - DNA, 765 bp, Homo sapiens
  source 1..765: mol_type = genomic DNA
gtactgttgtccattctcctgagagtccagggggctgtggtctccttcctccccccttgccctgtccccagcaaatggcctttaaaggtctggagccaggttaccgatgaggaggcctaggttcccttcctctttgcttctgggagcatctcgagcagtgcagagtggcttcccagccccagatggcaggattggggtgggtttgggatctgctgcctttgctcagtgtgcagggttggggtggaaatgggggacaggctagggcctctgcattaggctgccttcttaggcaggtgggctttcacttccagctcctcttccattttcacgatgtccttcttcctaggcactgcgaggggaggagaaaaggggctttgcagaggcctgggagtattcccaggaagtgcctggttggcgaaacaaccagggagctgctcctgggagctgggctgaggctttgctgggctgcctctcccactcacccttctcccggcccccaccatgccttccccatgggggaggggcagggggctggaggaacacagcttccccctgttctagcagagaaatgctggctgtatgcctcccctagggttcccaggctgactagggtgtggctggccttctgatggagcccactcatgctgggccgctgcccaggggctttgtggcacctaggtcgagatggtactcaggccaggggtcaggattcctgggtgctctggtcccggtgcctctgtctcatctttaggctgggattcctgc

SEQ ID NO: 1249 - DNA, 32 bp, Homo sapiens
  source 1..32: mol_type = genomic DNA
tccaagcccaatatgggacaccagcaccgagt

SEQ ID NO: 1250 - DNA, 30 bp, Homo sapiens
  source 1..30: mol_type = genomic DNA
gaccacctggcaagcgaccccctgacccct

SEQ ID NO: 1251 - DNA, 38 bp, Homo sapiens
  source 1..38: mol_type = genomic DNA
ccagcttcagcaccttcatggacggctacacaggagag

SEQ ID NO: 1252 - DNA, 36 bp, Homo sapiens
  source 1..36: mol_type = genomic DNA
ctcggcctcctccacatcctcgtcctcagccacctc

SEQ ID NO: 1253 - DNA, 54 bp, Homo sapiens
  source 1..54: mol_type = genomic DNA
gacttccaggtgtacggctgctaccccggccccctgagcggcccagtggatgag

SEQ ID NO: 1254 - DNA, 67 bp, Homo sapiens
  source 1..67: mol_type = genomic DNA
ggctccttcggccacttctcgcccagccagacttacgaaggcctgcgggcatggacagagcagctgc

SEQ ID NO: 1255 - DNA, 189 bp, Homo sapiens
  source 1..189: mol_type = genomic DNA
agagagctattccatgcctacggccttcccaggtttggcacccacttctccacaccttgagggctcggggatactggatacacccgtgacctcaaccaaggcccggagcggggccccaggtggaagtgaaggccgctgtgctgtgtgtggggacaacgcttcatgccagcattatggtgtccgcacatg

SEQ ID NO: 1256 - DNA, 76 bp, Homo sapiens
  source 1..76: mol_type = genomic DNA
cgcgcagccccaggtggggccttttgttggaaatggagagaggctggcctcatcccattgggacctgtggtctccc

SEQ ID NO: 1257 - DNA, 640 bp, Homo sapiens
  source 1..640: mol_type = genomic DNA
gaagctttcatttgccgggacactcgggcccatgggattgcacagagctggagggaggggtgagataggggcagataggagctgcaggggtgcctggcgagcctctggttttcctctgctcctctgcctgtcctctcccaactcaaggttctagtgggaaggggtgcccccaggctctcatgttcctggcgtgagatgaaaggatccctgcggagggtttggttcttgagggctgggggtggacttgggaacaggctgtgtgtttgtcccagcgatggtgcctgcttagcttcccgtccccaccccccagccccttggccctctcctgtctgccctagggagaaggcaggtggacaagggcccatgaaaaaatacaggtgtctagactgccagggagaccctggcccccagtagtgtgtcctggggacttcctcagagcgagaaacctcccccaatgtcttcaagacttttctctccccccgcccaaccccgtctctccctcccttgccacccaaatgttagaaaaatagctgtgaacagagagcgcttttgtctgcaatggcagcaggatctggacggtcccctcccctaagttcccccctccccaccccacactctgacagcttgttccgtgttgccc

SEQ ID NO: 1258 - DNA, 94 bp, Homo sapiens
  source 1..94: mol_type = genomic DNA
gcacagtgcagaaaaacgccaagtacatctgcctggctaacaaggactgccctgtggacaagaggcggcgaaaccgctgccagttctgccgctt

SEQ ID NO: 1259 - DNA, 269 bp, Homo sapiens
  source 1..269: mol_type = genomic DNA
cccagcggggcaagggtaggcttgagtggagtgggaccagcagggcccccaggcttctgccctggaggacccagaggagggcacgtcttatttccaccccacctctgaaccccaggccttggagggaggcagcctacacctgcctggattgtgagggtggtggcagggggaggttcctatagggtaccttggatctcagggactctgggtcctagggactcggtggggcgcgtctcagcagtggtgtgcacggcttgggctgagaggcc

SEQ ID NO: 1260 - DNA, 122 bp, Homo sapiens
  source 1..122: mol_type = genomic DNA
ttgtccgaacagacagcctgaaggggcggcggggccggctaccttcaaaacccaagcagcccccagatgcctcccctgccaatctcctcacttccctggtccgtgcacacctggactcaggg

SEQ ID NO: 1261 - DNA, 30 bp, Homo sapiens
  source 1..30: mol_type = genomic DNA
cccagcactgccaaactggactactccaag

SEQ ID NO: 1262 - DNA, 172 bp, Homo sapiens
  source 1..172: mol_type = genomic DNA
ctttgtgcgtgttaggagagctaccccctctggaaggactgaatgagaaaggaggtttaaaaaagaaagaaagaaaagcgactccctccagttcgacagatcaaagagaggatccccctctcggctgaccagatgggaaaatgcaccccctcaggcaggtggccaattagaa

SEQ ID NO: 1263 - DNA, 43 bp, Homo sapiens
  source 1..43: mol_type = genomic DNA
gggatgtacagcagttctacgacctgctctccggttctctgga

SEQ ID NO: 1264 - DNA, 107 bp, Homo sapiens
  source 1..107: mol_type = genomic DNA
gtcatccgcaagtgggcggagaagatccctggctttgctgagctgtcaccggctgaccaggacctgttgctggagtcggccttcctggagctcttcatcctccgcct

SEQ ID NO: 1265 - DNA, 49 bp, Homo sapiens
  source 1..49: mol_type = genomic DNA
ctttccctgatacacctgcctgtgaaccaccctgatcgctcttcgtgcc

SEQ ID NO: 1266 - DNA, 129 bp, Homo sapiens
  source 1..129: mol_type = genomic DNA
ctaagccaggcgagggcaagctcatcttctgctcaggcctggtgctacaccggctgcagtgtgcccgtggcttcggggactggattgacagtatcctggccttctcaaggtccctgcacagcttgcttg

SEQ ID NO: 1267 - DNA, 30 bp, Homo sapiens
  source 1..30: mol_type = genomic DNA
tcagatgtacagctaatcctgtacccttcc

SEQ ID NO: 1268 - DNA, 41 bp, Homo sapiens
  source 1..41: mol_type = genomic DNA
accggcatgggctgcaggagccgcggcgggtggaggagctg

SEQ ID NO: 1269 - DNA, 193 bp, Homo sapiens
  source 1..193: mol_type = genomic DNA
gaaccgcatcgccagctgcctgaaggagcacgtggcagctgtggcgggcgagccccagccagccagctgcctgtcacgtctgttgggcaaactgcccgagctgcggaccctgtgcacccagggcctgcagcgcatcttctacctcaagctggaggacttggtgccccctccacccatcattgacaagatcttc

SEQ ID NO: 1270 - DNA, 62 bp, Homo sapiens
  source 1..62: mol_type = genomic DNA
tgcacatgcgcactctcatatgccaccccatgtgcctttagtccacggacccccagagcacc

SEQ ID NO: 1271 - DNA, 57 bp, Homo sapiens
  source 1..57: mol_type = genomic DNA
ctgggcttgagctgcagaatgactccaccttctcacctgctccaggaggtttgcagg

SEQ ID NO: 1272 - DNA, 110 bp, Homo sapiens
  source 1..110: mol_type = genomic DNA
gggtgaccccacgatttgtcttatcccccccagcctggccccggcctttatgttttttgtaagataaaccgtttttaacacatagcgccgtgctgtaaataagcccagtg

SEQ ID NO: 1273 - DNA, 122 bp, Homo sapiens
  source 1..122: mol_type = genomic DNA
accctccttccacatgtacataaactgtcactctaggaagaagacaaatgacagattctgacatttatatttgtgtattttcctggatttatagtatgtgacttttctgattaatatattta

SEQ ID NO: 1274 - DNA, 150 bp, Homo sapiens
  source 1..150: mol_type = genomic DNA
gtgtaaaagtgtgagacaacacatttctgttgtttaagacacacaatctgtggtactttgatacagcagccctgacaaactaatacatggggtgtctcattgtagttttaatcagtaacacccattatgaactgaaaacgtctgctactt

SEQ ID NO: 1275 - DNA, 72 bp, Homo sapiens
  source 1..72: mol_type = genomic DNA
caagaggtgaccatcagcaagcccaggagagaggcctcagaagaaaccagacctgctgattccttgatcttg

SEQ ID NO: 1276 - DNA, 53 bp, Homo sapiens
  source 1..53: mol_type = genomic DNA
caacttgaatgcttcctgattaaatatatacaggagtgatttcagaggaattt

SEQ ID NO: 1277 - DNA, 83 bp, Homo sapiens
  source 1..83: mol_type = genomic DNA
ccattaagactaaccgtttttgctggagctgcaagattttccatttcttcatgagtcacccaaacgttgcctgaaggctagtg

SEQ ID NO: 1278 - DNA, 51 bp, Homo sapiens
  source 1..51: mol_type = genomic DNA
gtggctcttgaacaacacaggtttgaactgcatcattccacttatacacag

SEQ ID NO: 1279 - DNA, 30 bp, Homo sapiens
  source 1..30: mol_type = genomic DNA
actcctgagacaacatgaccaatctctccc

SEQ ID NO: 1280 - DNA, 60 bp, Homo sapiens
  source 1..60: mol_type = genomic DNA
cgtactttcaacataaagacgacgaggataaaggcatttatgatgaactacttccacata

SEQ ID NO: 1281 - DNA, 254 bp, Homo sapiens
  source 1..254: mol_type = genomic DNA
gcttactttattgtacgaatggagcatatatgtgtacatataaaacacataatacatgcttatcaactatttgtgttatcagtaaggcttccagtcaacagtaggctcttagtagttaagtcttgggagagccaaaaattctagctgattttttgactgtgtgtggggggtcagcacccttaactcctatcttattcaaggggctattgtattctaaattgtcttttagcttgagtcataatccaggtatagtg

SEQ ID NO: 1282 - DNA, 64 bp, Homo sapiens
  source 1..64: mol_type = genomic DNA
gcaaaatacagtgccaagagctctggaccacaaatcagaagacctgagccctaattcctttcca

SEQ ID NO: 1283 - DNA, 72 bp, Homo sapiens
  source 1..72: mol_type = genomic DNA
tttgttcgtcgcttgccaaaatagcagcgaactctctgtcaaactgcaactcattttatcggagcaaaaact

SEQ ID NO: 1284 - DNA, 51 bp, Homo sapiens
  source 1..51: mol_type = genomic DNA
gaagcagctgatcgctaatatctgatggctaatatgctaaatttccctgtc

SEQ ID NO: 1285 - DNA, 315 bp, Homo sapiens
  source 1..315: mol_type = genomic DNA
gaggcagtgcagcttgtgttacaactcaaaagagtaatactctgaaaaaagaaaaaaaaagatggcgctgaaaataaacatgttcagcagccattgtgattcaacttacccagatgtgcttttcatgagatggagaaggacggatggaaaagaaaagcacacaaatgttaatggatacagttcaatccaaagaaaaccatggaataaaacaagagcattatttaagatgtgagaaagctcaggtatgagaaagacatggtgccattttgtatttcatcatgacacacatactcactgcgtcgaaaagcatagtca

SEQ ID NO: 1286 - DNA, 164 bp, Homo sapiens
  source 1..164: mol_type = genomic DNA
gcgaatgcaactttgaccctaagaaatcctttatgcaggtggagacacagcttcttcaaccaatgaaagaaataatatctggcttcttgaatagtttcatggtgccaccaacaaaaactatcatagaccaacaatggcaagatggcatcggcaagaatgagctg

SEQ ID NO: 1287 - DNA, 90 bp, Homo sapiens
  source 1..90: mol_type = genomic DNA
ccagaatctcatcgtgcaggctacaaatagcagctgcagctgcagaccaagggctggcctttacatgtccatggtgcaaaaggactcctg

SEQ ID NO: 1288 - DNA, 75 bp, Homo sapiens
  source 1..75: mol_type = genomic DNA
caactgcttgtcacaccgacctgcaccatctctcgcctgcctgtggggtttctgtcaactagtcgtggagggaag

SEQ ID NO: 1289 - DNA, 25 bp, Homo sapiens
  source 1..25: mol_type = genomic DNA
atgccagaacccactaagaaagagg

SEQ ID NO: 1290 - DNA, 50 bp, Homo sapiens
  source 1..50: mol_type = genomic DNA
agtatccccgaatcaaacatgaatgttgaagtcaactacccagactgaag

SEQ ID NO: 1291 - DNA, 244 bp, Homo sapiens
  source 1..244: mol_type = genomic DNA
tacacactaactttaatttggaatacagtaaatattgtattagtgtgtcatatatttactgaattaaaaattaaaattggttgggcatggtggctcatgcctataaactcagcactcagggaagcagaggcaggtggatcacctgaggtcaggagtttgagaccagcctggccaacatggtgaaaccttgtctctactaaaaatacaaaaaattagctgagcgtggtggtggacccgtgtaatt

SEQ ID NO: 1292 - DNA, 185 bp, Homo sapiens
  source 1..185: mol_type = genomic DNA
tgccaggggacggttatggatttcttggcagcaaggagaagcggcttttgtgcagggaggaacagcctgccagtcaactatatttatggagcacctgctgtgtggaatctgaaaaggagaaggagaagggccttgtcctcaagaagcttgtgatcaaagggagaagaaaagtccccatctactgt

SEQ ID NO: 1293 - DNA, 55 bp, Homo sapiens
  source 1..55: mol_type = genomic DNA
tgaacaacggctttgaatgcgaacctggggagtgtagacctaaccaaataataat

SEQ ID NO: 1294 - DNA, 125 bp, Homo sapiens
  source 1..125: mol_type = genomic DNA
atttggcacgggaaatgctatgctctttgttcatgtggatgcctttacctacttggaaatagtatgttctttaacagaagtttctttgtcagacttcatagccagactgctctgtaataaccaga

SEQ ID NO: 1295 - DNA, 30 bp, Homo sapiens
  source 1..30: mol_type = genomic DNA
aaaatgaagtgccagccccagccccacccc

SEQ ID NO: 1296 - DNA, 394 bp, Homo sapiens
  source 1..394: mol_type = genomic DNA
cactcacacacgtttgggctgcaaatacagagggtccatcccagcatgatttggcctccacgggtgctgtgagctgtgagctttaacctaactcctactgagaagttggatggtgaccattgtgataagttgagaataataaaaataatacactgtgtttatataatcctcttgtgttaatctaatttggatggcacttcatatatattagggggacaattcttatgaaacctttcaaattatgtaaaagttattatgtccgcattttacagtgtggaggctgagcctccatccaaggggctgaagaatttgtgaggctttttcctatatagtgaaggtcaaacaaacccacatcttctttatgagagtggggagtggatccatctctaccctg

SEQ ID NO: 1297 - DNA, 41 bp, Homo sapiens
  source 1..41: mol_type = genomic DNA
ctggcaacaggaaatgagtacagagatccagtgagaccctt

SEQ ID NO: 1298 - DNA, 27 bp, Homo sapiens
  source 1..27: mol_type = genomic DNA
aaaaatatgcttgtactttctacacag

SEQ ID NO: 1299 - DNA, 32 bp, Homo sapiens
  source 1..32: mol_type = genomic DNA
agagaaggaggccggaactacaccagcaaaag

SEQ ID NO: 1300 - DNA, 157 bp, Homo sapiens
  source 1..157: mol_type = genomic DNA
tctgcaagtcccaatcagtataatgacaaatggtgcattgctaagtttccattacatgtatttctaaaagaaaaacaacaatgataaaaatatcacaagcacttgttgagatgccagcaaattaattggtagtttccaagtttcgacatgcatgcta

SEQ ID NO: 1301 - DNA, 182 bp, Homo sapiens
  source 1..182: mol_type = genomic DNA
gacactactgttgggtgatctagacgaagactatttcatgatactctgaagcgctgcattcatatgtattccttcatggtctaaaacaactgtgcatgtcctccaaatagtcttaacatttagtagactttgaaactactcacctatcaaatttttgcttaaaaaacagattgccggccagg

SEQ ID NO: 1302 - DNA, 74 bp, Homo sapiens
  source 1..74: mol_type = genomic DNA
gcacaatgttgtggaatgtgaatgcatgcatattagttcaggagaaaaaattcaaaatgaactaagtttgggag

SEQ ID NO: 1303 - DNA, 79 bp, Homo sapiens
  source 1..79: mol_type = genomic DNA
tgctaacaggaaacaataccgacgttctttttcttatagcatttgtattataaaaagcacaaagctccagcccactgaa

SEQ ID NO: 1304 - DNA, 40 bp, Homo sapiens
  source 1..40: mol_type = genomic DNA
atgaagtcttttctccttgactttttactcctatttcttg

SEQ ID NO: 1305 - DNA, 33 bp, Homo sapiens
  source 1..33: mol_type = genomic DNA
gaagaggaagtctccccgcctagcgccttgcct

SEQ ID NO: 1306 - DNA, 117 bp, Homo sapiens
  source 1..117: mol_type = genomic DNA
gctttcatacttggagctctactgattttccatccaagccaacttgtagggttttttccttcctatcaccagaggagacagggtttaggggaatccaagaaggttgaagtcagcact

SEQ ID NO: 1307 - DNA, 35 bp, Homo sapiens
  source 1..35: mol_type = genomic DNA
tttgggtagtcgggccctggagagaaaagattcag

SEQ ID NO: 1308 - DNA, 187 bp, Homo sapiens
  source 1..187: mol_type = genomic DNA
gagctcatttcttgaagctgtattgattctaatccttgtcttattcagattgtagtttttacggcaatctttcattacgtttcctcttacaagaaaactaatgtattgagaaacaattaattttgcatgatacacacgcattcaaggatctagccaaaaataccacaggtttgttctatcattttta

SEQ ID NO: 1309 - DNA, 320 bp, Homo sapiens
  source 1..320: mol_type = genomic DNA
actggccaccattgtttacctgttaggggacaggcaagatggggaagcaaaggaattattgccatcaaagagagaataacagcttacctggaaagttccactatttctaagaattacataatgttcatttgccccatcatggaagagatacccctgtaagaatgggaatctgttcccctctactgatggctgctgggggcagaaagaatgatgttgtatttatctaggtttattagacaaagaaaagctacagcgttggtgagaacaacaaatccaggtaagactgcctaagaagagcctggccctgaaataatcctttt

SEQ ID NO: 1310 - DNA, 70 bp, Homo sapiens
  source 1..70: mol_type = genomic DNA
tggacccttgtcgaaactcctcctggggaggaacaagccaagcagaatgccaactcccagctgtccatct

SEQ ID NO: 1311 - DNA, 56 bp, Homo sapiens
  source 1..56: mol_type = genomic DNA
agcaaaacaaatgacgcttgttaaagagcaagctgaatcccttatgcttcttctag

SEQ ID NO: 1312 - DNA, 111 bp, Homo sapiens
  source 1..111: mol_type = genomic DNA
atcaccttcatagccaaagtcaaggctgaagatcttctgagaaaacccactatcaaatggttcaaaggaaaatggatggacctggccagcaaagccgggaagcaccttcag

SEQ ID NO: 1313 - DNA, 88 bp, Homo sapiens
  source 1..88: mol_type = genomic DNA
catttgagatgcagatcatcaaggccaaagataactttgcaggaaattacagatgcgaggtcacctataaggataagtttgacagctg

SEQ ID NO: 1314 - DNA, 32 bp, Homo sapiens
  source 1..32: mol_type = genomic DNA
tctactgggactactccaaacattgacatcag

SEQ ID NO: 1315 - DNA, 31 bp, Homo sapiens
  source 1..31: mol_type = genomic DNA
aggatgcaggagaacttgactttagtggtct

SEQ ID NO: 1316 - DNA, 348 bp, Homo sapiens
  source 1..348: mol_type = genomic DNA
agtgagacattgtggcctggaagtctttcagacacccactcagagaagtcaagtttaaagtggatgttcttcagagaatttttcatttctgaaaatgtgttttgcttatagaatataacagagttgactagaaagagagaaacaactgcatactaatcttttaaagcctttaacagttgcttttaaactttctttttaaatgtttcatgactcttcacctatttttttttaaatggggacgaagagatatgaaaactgagacataagacaaatacctagaaacctctaagactgcacatatgatttggtagaagtctgaaggtatacacattgtaagaggcagaccta

SEQ ID NO: 1317 - DNA, 283 bp, Homo sapiens
  source 1..283: mol_type = genomic DNA
atagatacacttttgtgggaggaaaaatagtggtaaaaacatggactggagtctcagctctaccatttactaattatgtgactttggtcaaatatttgacccctctgagacttggatttcacatctggaaatgtgaagaataaacactacttaatagaattattgtgcaaattaaattaagtgtaaaaagcttggttcacagtaggtggcaaataaatatgtacttcctctaaggaaatgtgtcattttctctaacatagtttatattcataaggagacaaca

SEQ ID NO: 1318 - DNA, 343 bp, Homo sapiens
  source 1..343: mol_type = genomic DNA
ctctgtacaacgaaagatcttcctgctctgaacaaagccagcttacttcaaatagacattagctaaatcagattaaatcttttgggcagcatcctgttataggaattgacctgtataaatacttgtaagttgtactctacataaaatttctataactgttatactcttcactaggatcaccaagttattgaaattttgatgtagatgaaaatacagtgagtattatacaggtctatcccgaggcttggaaaagaatcagaagtgcctacagaaatttggctttttctcctcactgtaacttaacatagccatgcagacagggtcatgtgcagccaccatggta

SEQ ID NO: 1319 - DNA, 82 bp, Homo sapiens
  source 1..82: mol_type = genomic DNA
cagtgagtacgagaagatcgccttccagtatggaatcaccgacctgcgcggcatgctcaagcgactcaagcgcatgcgcaga

SEQ ID NO: 1320 - DNA, 119 bp, Homo sapiens
  source 1..119: mol_type = genomic DNA
cttgatcctgcatatcaggttgacaaaggaggcagagtgaggtttgttgtggagctggcagatccaaagttggaggtgaaatggtataaaaatggtcaagaaattcgacccagtaccaa

SEQ ID NO: 1321 - DNA, 122 bp, Homo sapiens
  source 1..122: mol_type = genomic DNA
tacatctttgaacacaaaggatgccagagaatcctgtttatcaataactgtcagatgacagatgattcagagtattatgtgacagccggtgatgagaaatgttccactgagctcttcgtaag

SEQ ID NO: 1322 - DNA, 51 bp, Homo sapiens
  source 1..51: mol_type = genomic DNA
tggtcaccaggagctgttggcttcttctcccagggataatgatcaaagtga

SEQ ID NO: 1323 - DNA, 91 bp, Homo sapiens
  source 1..91: mol_type = genomic DNA
agcctccaattatggtgaccaaacagctggaagatacaactgcttattgtggggagagagtggaattagaatgtgaggtgtctgaagatga

SEQ ID NO: 1324 - DNA, 138 bp, Homo sapiens
  source 1..138: mol_type = genomic DNA
tccctggtccaaaatcaagataccgaattagagttgagggtaaaaaacacatcttgatcatagagggagcaacaaaggctgatgctgcagaatattcagtaatgacaacaggaggacaatcatctgctaaacttagtg

SEQ ID NO: 1325 - DNA, 35 bp, Homo sapiens
  source 1..35: mol_type = genomic DNA
tgacacctctgactgatcagactgtaaatcttgga

SEQ ID NO: 1326 - DNA, 39 bp, Homo sapiens
  source 1..39: mol_type = genomic DNA
cctgttcaggagagtgaccgtctaaaggtggttcacaag

SEQ ID NO: 1327 - DNA, 84 bp, Homo sapiens
  source 1..84: mol_type = genomic DNA
tccacaagttagtgatagccaatgccctcactgaagatgaaggtgattatgtatttgcacctgatgcctacaatgttactctgc

SEQ ID NO: 1328 - DNA, 70 bp, Homo sapiens
  source 1..70: mol_type = genomic DNA
aggaaacaagcttcgtcttgagatccccatcagcggagaaccacctcctaaagccatgtggagccgggga

SEQ ID NO: 1329 - DNA, 139 bp, Homo sapiens
  source 1..139: mol_type = genomic DNA
ggcagtggccggataagaacagaatcttaccctgatagcagcactctggtcattgatatagctgaaagagatgactctggtgtttaccacatcaatctgaaaaacgaagctggagaggcacatgcaagcatcaaggtta

SEQ ID NO: 1330 - DNA, 99 bp, Homo sapiens
  source 1..99: mol_type = genomic DNA
ctgatcctccagtggcaccgactgtgacagaggtgggagatgactggtgtatcatgaactgggagcctcctgcctacgacggaggctctccaatcctag

SEQ ID NO: 1331 - DNA, 153 bp, Homo sapiens
  source 1..153: mol_type = genomic DNA
aagaaacaaagctccaggtggatgaggctgaattttgatctctgcaaagaaacaacttttgagcccaagaagatgattgaaggtgtggcctatgaggtccgcatctttgcagtcaatgccattggcatctccaagcccagtatgccctccagg

SEQ ID NO: 1332 - DNA, 119 bp, Homo sapiens
  source 1..119: mol_type = genomic DNA
cctcctactcttctgactgtggactctgtcactgacacgactgtcacgatgaggtggcgccccccagaccacattggtgcagcaggtttagatggctatgtgctagagtattgctttga

SEQ ID NO: 1333 - DNA, 166 bp, Homo sapiens
  source 1..166: mol_type = genomic DNA
gtgcctcaggtcagaagccacagtctgcacagagcaggctgtgctctcctgaggaacccccctaacaccgtttggtctcttccgtcactgctctgaggacaaatctctttgcacactttgcatactttactaacagagaatgctgactgctgatacgatattattc

SEQ ID NO: 1334 - DNA, 26 bp, Homo sapiens
  source 1..26: mol_type = genomic DNA
gtacatcagcaaaacagtctgatgaa

SEQ ID NO: 1335 - DNA, 42 bp, Homo sapiens
  source 1..42: mol_type = genomic DNA
tctgattgacaagacgaagttcaccatcacaggtctgccaac

SEQ ID NO: 1336 - DNA, 81 bp, Homo sapiens
  source 1..81: mol_type = genomic DNA
tgcgtgtgaaggctgttaatgcagctggtgccagcgagcccaagtactattctcagcccattctcgtgaaggaaatcatag

SEQ ID NO: 1337 - DNA, 88 bp, Homo sapiens
  source 1..88: mol_type = genomic DNA
acctccaaagattcgcattccaagacacctgaagcaaacctatatccgcagagttggagaagctgtcaatctggttatacctttccag

SEQ ID NO: 1338 - DNA, 28 bp, Homo sapiens
  source 1..28: mol_type = genomic DNA
aataaaaccagaagtggcaacaaggcag

SEQ ID NO: 1339 - DNA, 116 bp, Homo sapiens
  source 1..116: mol_type = genomic DNA
ataaacattcgcaactctgagactgatacaatcatatttattagaaaagcagagaggagccactctgggaaatatgatctgcaagtcaaagtggacaaattcgtggagaccgcatc

SEQ ID NO: 1340 - DNA, 102 bp, Homo sapiens
  source 1..102: mol_type = genomic DNA
ccaaattgtgaagattgaggatgtctggggagaaaatgtcgctctcacatggactccaccaaaggatgatggaaatgctgctatcacaggctataccattca

SEQ ID NO: 1341 - DNA, 28 bp, Homo sapiens
  source 1..28: mol_type = genomic DNA
ctttctctggttcatcagtagcaaaagg

SEQ ID NO: 1342 - DNA, 133 bp, Homo sapiens
  source 1..133: mol_type = genomic DNA
ccaactggggctatggagaagtgatgtggcagagcagaaaggaaaagacctgtggagccacagagctggtcttaaaccccagcattgctacttaagaccacatgtataaggaccacacgtgaccacaatcact

SEQ ID NO: 1343 - DNA, 152 bp, Homo sapiens
  source 1..152: mol_type = genomic DNA
ggtttactgtcattgagcattatcatcgaaccagtgccaccattactgaattggtcatagggaatgaatattacttccgggtcttttctgaaaacatgtgtggcctcagtgaggatgccaccatgactaaagagagtgcagtgatcgccagg

SEQ ID NO: 1344 - DNA, 81 bp, Homo sapiens
  source 1..81: mol_type = genomic DNA
tcagaggcacccatgtttactcagcctttggttaacacctatgccatagctggttacaatgccaccctaaactgcagtgtg

SEQ ID NO: 1345 - DNA, 44 bp, Homo sapiens
  source 1..44: mol_type = genomic DNA
gtaccatgttcttctatcacatcagttaaagtccctgtcttgta

SEQ ID NO: 1346 - DNA, 300 bp, Homo sapiens
  source 1..300: mol_type = genomic DNA
cactacactgtctgcgataggttaaagtaaacaacaattacactacactgtaagacagaatatgaatgtgctttgataagggtacagtgtgctaagaagggagctatcatatccagttgaagagattagaaaggtttcaaggtttcatgtttgcatttgaaaagaacaacgaattaatgaatatcgcccatagagatgtacatatccctgggtgcaagacagaaagtaccctagaattgggaaaatttatgaacttctttttttcctgtatataccttgatcagaaatagggaagtcgtc

SEQ ID NO: 1347 - DNA, 62 bp, Homo sapiens
  source 1..62: mol_type = genomic DNA
cactggctttgatggtctattaatatgccaattacagatatgttttgacctaagtttcttca

SEQ ID NO: 1348 - DNA, 112 bp, Homo sapiens
  source 1..112: mol_type = genomic DNA
ggatgatccaagatacaggatgttcagcaaccagggagtctgtaccctggaaattcgcaagcccagcccctatgatggaggcacttactgctgcaaagcagtcaatgacctt

SEQ ID NO: 1349 - DNA, 141 bp, Homo sapiens
  source 1..141: mol_type = genomic DNA
gccttactattgagataacccttacaaatttaaacatttttagctgctttattggctttaaatgattaagttcataattgcaagtcatctggtttctaaactgctagccttattagttccaaagtattgttgatgcttttg

SEQ ID NO: 1350 - DNA, 44 bp, Homo sapiens
  source 1..44: mol_type = genomic DNA
tatatcaaggagtaaatacccctggacaaccagtcttcctggag

SEQ ID NO: 1351 - DNA, 170 bp, Homo sapiens
  source 1..170: mol_type = genomic DNA
ttatatcccactggatattctactttccgttccattcctcttacatgaaaatgcaccttgcatgtaaagcttgactttctcatttgcttttaattgtaccccttagcagctcatggcatacagtgcttatgccatgaacaaggaaggccaaattattcaaggatattaag

SEQ ID NO: 1352 - DNA, 117 bp, Homo sapiens
  source 1..117: mol_type = genomic DNA
tgtacactaacactttgtctattgtctatgtttttcttttgttgaaaaacacgatatatatatgttgtagggttttggtttttgtatttgttttaagctaatggtttggaagctctt

SEQ ID NO: 1353 - DNA, 910 bp, Homo sapiens
  source 1..910: mol_type = genomic DNA
gtcataagccataccaagcctgtggagtatggcatgattttcattacataatccaatgaaaatagacttattttaaatccctaactttgtagttttaatttgtatttcactatcttgaaattaacagctagtacttatccatcacagcagtctcctactgacatgaagcaagttgttgaatgcagtagagcatgaatgaaagcatttaatgtagacaaaaatgggtgatacccaagcattctgaattatttgcatcaaggaatggacatgtacataagtggcatcatttctaccaatatgtgacttgagttgtttttttaaaaaaaggagaatgactttctcaaatttgcattaaagaagtttttaagaatgttcaaatggcatgctgctttgtctggacgtgaatttattagcaagtagtaaagcacttcactaaaggaccatgaatttttgtggtttcatggattctctcttgaagggtacttttatttttttaatataattcagaaactcagaaggtaggtatgaaatattggtaggtgtttctcgcaccttcagaaagtattggaccggtcttattattataattttaacaaaatatttccaatttttgtgcttttgacatgcataaatgaccaaagttaaagggagtagtttttatcttttctaatgtgcttgaatcgaaactctctgtgcctaattaaaaagaacattaacaaactggaagcagatcttcccactgatccataatgtggtatgcatttattctgctgttcagtcagaacatttaaatcatctatgaggaatcacaaaacctctcaaagagcaataaatactttccaaccacttgggaatttaaatgaagattgaacaatagtaggggaaaaactgctgtggttctactgggaac

SEQ ID NO: 1354 - DNA, 70 bp, Homo sapiens
  source 1..70: mol_type = genomic DNA
agactcctcttgcaaggcgtacctccaaacataattgattcgtatctgcgagacttacactcaagcaatc

SEQ ID NO: 1355 - DNA, 121 bp, Homo sapiens
  source 1..121: mol_type = genomic DNA
tggctactgtctctctgcactctgctgctttgaaatctggttgaaatgagaaaaagcattttctgttttcccaccaggcccccaagtgtggtctttttctttcctcctaatgttgaagaga

SEQ ID NO: 1356 - DNA, 475 bp, Homo sapiens
  source 1..475: mol_type = genomic DNA
ggctgcgctgctctttgattggcttcgttaatatttggcaaagcattgccacttacccactcagcgaagatgcacaaaaacgtcatcactgattctttcagttcgatgcctgttaactgcgggtgtaaactgctggtgatggtgtcatttactaccaaagaagtgtggagcaggatgggtgagagagtgagtgagtgagcaggtggaaggacagtgggtgaaggataaaaaggtgggaaacattttttttttaaaaagtgaaacttcaaatacagcggaggtggcttctttcctatgaggctggctgatgggtgccagataccaaggcccatgtgttactgaggagacagcctgctgggctggggtcaggagctagcggagggaaacggttagatctcagaaaaatctcatcactatgccctagtagcttaatgacatcactagcatgagcacatggtgtacttggcgggatctt

SEQ ID NO: 1357 - DNA, 80 bp, Homo sapiens
  source 1..80: mol_type = genomic DNA
tcaccggctgtcacataatactctgaatcatctgtcatctgacagttattgataaacaggattctctggcatcctttgtg

SEQ ID NO: 1358 - DNA, 123 bp, Homo sapiens
  source 1..123: mol_type = genomic DNA
accagaagactcattaggatccataatagctgccagtgtagaggagcctcagttactttcactttgatcattatccctgggagaagaagccaacagctcctggtgaccacaataagagatttc

SEQ ID NO: 1359 - DNA, 133 bp, Homo sapiens
  source 1..133: mol_type = genomic DNA
tgtgtgaaacaaggattatccagtaaaatctgttgggtttcaaagctataactagaataattatttttgcaagatagtgcttggcttgagtcaaaacatgaggcatttgtactcaacaggttctctttctccc

SEQ ID NO: 1360 - DNA, 265 bp, Homo sapiens
  source 1..265: mol_type = genomic DNA
gagccacctgctcgcactcaagatgaatcaggtgcaactgctaagagtggatattacccccatgtaggctcttgaagcacattagtaagaatatcatttaatgcattttaaagataactatgattctctattagaatgaacaatctacactgtaccaattactacaaatcctgctgtgtaatttactgtacctttcaacataacatttcattttaagatttaaaatttctagtttttaattttaagattactcacaaggaacctg

SEQ ID NO: 1361 - DNA, 95 bp, Homo sapiens
  source 1..95: mol_type = genomic DNA
taagccacacccatttacatctgaggtcacaactactcatcagattttgaataatcctctttctactgcttcacaacagttcacaagccacaaca

SEQ ID NO: 1362 - DNA, 46 bp, Homo sapiens
  source 1..46: mol_type = genomic DNA
tctgttcttatccggccactgccttccataatagcctaagaagtgg

SEQ ID NO: 1363 - DNA, 144 bp, Homo sapiens
  source 1..144: mol_type = genomic DNA
cttgacatgtcagcttgattctagaagtgcgtttacctggaggacttacccacaactttaaccttgatgcttgcatgtgcctctccagcttcgtttttcagattgatgtggtaaacaccagagtcatctctttcagctatatca

SEQ ID NO: 1364 - DNA, 104 bp, Homo sapiens
  source 1..104: mol_type = genomic DNA
cactgatcagattacaggcatttcatctccctgctcgtctgcctttgatctgcatggttaattttattttcctggatttgaagtttcgtctgggcttgtgctga

SEQ ID NO: 1365 - DNA, 32 bp, Homo sapiens
  source 1..32: mol_type = genomic DNA
gtaagtactgcaaagagctcagcatgttgcag

SEQ ID NO: 1366 - DNA, 145 bp, Homo sapiens
  source 1..145: mol_type = genomic DNA
acactcaaatgagggaaagtgggaactatagtgtttgttccctcagcatctgagggggactgctttcaggacaccctcttggataccaaaatctgcaaatgctcaagtcccttacaaaaaatggtataaatttgcatatgctctg

SEQ ID NO: 1367 - DNA, 120 bp, Homo sapiens
  source 1..120: mol_type = genomic DNA
cgttgccgggctacgggagagcgcggagccctgcgctgggaggtgcacggtgtgcacgctggactggacccccatgcaaccccgcgccctgcgccttaaccaggactgctccgcgcgccc

SEQ ID NO: 1368 - DNA, 393 bp, Homo sapiens
  source 1..393: mol_type = genomic DNA
gggttatcttctagtccacatgtcacataatatgtacctttatttaccttttaaactgaagttttaaaacctgggttttaaaaagagaacaactacccatcagcaattacagaagacaaaggaacttgtgtgtctgaagactgagtgttatttagcagctctttggtcagcttggattggtcacatatgtggaaactgggaaataataggggctacttacactggagaagaacactacaaatggtgtaaagagtggttttggaatgtatccagacttccttctaaaataaaaatttaaacagctgtgtttgagagatgggtatgcacaattcttgtaagaaagactgtgtagatgtttgaggtccccttagtccctgatgctaccattgttcc

SEQ ID NO: 1369 - DNA, 74 bp, Homo sapiens
  source 1..74: mol_type = genomic DNA
ttgtctgtattagagcactaccttcaagaaatggggttctgacctggatttgtgctaccacagtgacttgcatt

SEQ ID NO: 1370 - DNA, 34 bp, Homo sapiens
  source 1..34: mol_type = genomic DNA
aactctccaacaataaatacatttgataagaaag

SEQ ID NO: 1371 - DNA, 25 bp, Homo sapiens
  source 1..25: mol_type = genomic DNA
taaaagtgctactagaacaagagaa

SEQ ID NO: 1372 - DNA, 45 bp, Homo sapiens
  source 1..45: mol_type = genomic DNA
gtggagaaggtttgtacagaattatatgcatcaaaaacaatgtcc

SEQ ID NO: 1373 - DNA, 48 bp, Homo sapiens
  source 1..48: mol_type = genomic DNA
agactgtagacagcaagaattcagggatcggtctggaaactgtgttcc

SEQ ID NO: 1374 - DNA, 26 bp, Homo sapiens
  source 1..26: mol_type = genomic DNA
tagctcagcagatccaactcccatgg

SEQ ID NO: 1375 - DNA, 238 bp, Homo sapiens
  source 1..238: mol_type = genomic DNA
cccagcctcccgattgggagacacctcccagcaggggtcgccagacacctcatacaggagagctctggctggcatctggtgggtgcccctttgggacgaagcttccagaggaaggaacaggcagcagtctttgctgttctgcagcctctgccaatgatacccaggcaaacagggtctggagtggacctccaacaaactccagcagacctgaagcaaagggcctgactgtttgtaggaa

SEQ ID NO: 1376 - DNA, 51 bp, Homo sapiens
  source 1..51: mol_type = genomic DNA
gtcttctcaaggattcggggaagtactgcgtacttccttcaagcttttaag

SEQ ID NO: 1377 - DNA, 53 bp, Homo sapiens
  source 1..53: mol_type = genomic DNA
atgtggcttcggctatggggaggatgcacagtgtgtgacgtgccggctgcaca

SEQ ID NO: 1378 - DNA, 93 bp, Homo sapiens
  source 1..93: mol_type = genomic DNA
gcaagccctgtctggactgcgcagtggtgaaccgctttcagaaggcaaattgttcagccaccagtgatgccatctgcggggactgcttgccag

SEQ ID NO: 1379 - DNA, 53 bp, Homo sapiens
  source 1..53: mol_type = genomic DNA
ttataggaagacgaaacttgtcggctttcaagacatggagtgtgtgccttgtg

SEQ ID NO: 1380 - DNA, 41 bp, Homo sapiens
  source 1..41: mol_type = genomic DNA
acgcaacacaggcagagccaaggggacgcctggccttttga

SEQ ID NO: 1381 - DNA, 207 bp, Homo sapiens
  source 1..207: mol_type = genomic DNA
gtacctgcctgctaaggaacagacccacctgcctgctgtggttgtattgccagaagtgttggattcacatcttggctgcgctttgtactgatggtgtaaccttgggcaaatagtctcccctctttgaacctctgtttactctggaaaatgcccaagtctgcagattttggatagaactaaatgaactagtagtccagcaacatgata

SEQ ID NO: 1382 - DNA, 179 bp, Homo sapiens
  source 1..179: mol_type = genomic DNA
tcggccataccctgacccagatgtgttctttggagggtctgctgctttggagttgtcctggacggggaggatctcatggtgcatctggctctgatgtttgtcttctggggcttcacctcccctggtgggtgagcactgaagggtaccggaaagtgggttccatggagttttgtgcctga

SEQ ID NO: 1383 - DNA, 142 bp, Homo sapiens
  source 1..142: mol_type = genomic DNA
gcagctcagatgggggccaggtgctgtggctcacgcctgtaatcttactactttgggaggctgaggtgggaggatcacttgagcccaggagttcaagaccagcctgggcaacatagtgagacaccatattcacaaaaaataa

SEQ ID NO: 1384 - DNA, 63 bp, Homo sapiens
  source 1..63: mol_type = genomic DNA
cctctgcatgatgagcccacaaagccagtgcctaaaggactaattaagggctccatttactga

SEQ ID NO: 1385 - DNA, 63 bp, Homo sapiens
  source 1..63: mol_type = genomic DNA
tggtatttatggtaattaacatacaaaacagctgtacttacaatccggcaagtgccaaagagg

SEQ ID NO: 1386 - DNA, 49 bp, Homo sapiens
  source 1..49: mol_type = genomic DNA
gtcaggccccctggaagatttggccagcagggcagtggtctgcgtgccc

SEQ ID NO: 1387 - DNA, 25 bp, Homo sapiens
  source 1..25: mol_type = genomic DNA
ccggccctggagggagcgggcgaca

SEQ ID NO: 1388 - DNA, 37 bp, Homo sapiens
  source 1..37: mol_type = genomic DNA
tccctaagtgaagctgacccacacataacccacaccc

SEQ ID NO: 1389 - DNA, 37 bp, Homo sapiens
  source 1..37: mol_type = genomic DNA
gtggcttcttgctggacctagcttaacgacgagcctg

SEQ ID NO: 1390 - DNA, 51 bp, Homo sapiens
  source 1..51: mol_type = genomic DNA
tccaactcctaccttgggagagaatgacagtgaaccaaacaagtaaagtat

SEQ ID NO: 1391 - DNA, 27 bp, Homo sapiens
  source 1..27: mol_type = genomic DNA
ggagagcacagccaggccacagtggcc

SEQ ID NO: 1392 - DNA, 79 bp, Homo sapiens
  source 1..79: mol_type = genomic DNA
cagcagatctattggagtgtgcctggcagctggttctgcaggagctcacctgccctaatagaatgttcaggcccttctg

SEQ ID NO: 1393 - DNA, 151 bp, Homo sapiens
  source 1..151: mol_type = genomic DNA
atgcagtcacctccacagaatgccccccgcccctgccccaggacacccagacgttgctcagcatgcttactgcccccacgtctgatcacagtggcccgtcatgcagacaccaagaccaatgggaaggcggaggaccccgaacatctctgtg

SEQ ID NO: 1394 - DNA, 65 bp, Homo sapiens
  source 1..65: mol_type = genomic DNA
ggtgcctgccagcttcgccataaacactgcatctgcagttgttcagagcatgctgaccccattcc

SEQ ID NO: 1395 - DNA, 93 bp, Homo sapiens
  source 1..93: mol_type = genomic DNA
gtgccagcaaggtcaacctcgtgaagatcgcgtccacggcctccagcccacgggacacggcgctggctgccgttatctgcagcgctctggcca

SEQ ID NO: 1396 - DNA, 33 bp, Homo sapiens
  source 1..33: mol_type = genomic DNA
gtaagagacagtttatggagaagaaacccagct

SEQ ID NO: 1397 - DNA, 122 bp, Homo sapiens
  source 1..122: mol_type = genomic DNA
gtaagttttgagctcattacatttcttagcatttaggggaagggcatttattactattgtcgtgcaagtgttccacaagagacttggctgagacaagcaccagtgagttgtgaaagaacgca

SEQ ID NO: 1398 - DNA, 58 bp, Homo sapiens
  source 1..58: mol_type = genomic DNA
agctttgtaaggagacttacaaggctgtgatgtccctgcgccactaggcaaaaataaa

SEQ ID NO: 1399 - DNA, 86 bp, Homo sapiens
  source 1..86: mol_type = genomic DNA
ggtctctgcggtcacaggacattcagtacaacggctctgagctgtcgtgttttgacagacctcagctccacgaatatgcccacaga

SEQ ID NO: 1400 - DNA, 96 bp, Homo sapiens
  source 1..96: mol_type = genomic DNA
tgcgcttgctcccatccatgtgctgtgaggaggcctgcagccccaacccggcgactcttggttgtggggtgcattctgcagccagtcttcaggcaa

SEQ ID NO: 1401 - DNA, 60 bp, Homo sapiens
  source 1..60: mol_type = genomic DNA
ggagatggtgccgactttcttcggatccctcacgcagtccatctgtggcgagttttcaga

SEQ ID NO: 1402 - DNA, 202 bp, Homo sapiens
  source 1..202: mol_type = genomic DNA
agctcaacgtctttggattcaaatagcagtcaagatttggttggtggggctgttccagtccagtctcattctgaaaactttacagcagctactgatttatctagatataacaacacactggtagaatcagcatcaactcaggatgcactaactatgagaagccagctagatcaggagagtggtgctgtcatccacccagcca

SEQ ID NO: 1403 - DNA, 27 bp, Homo sapiens
  source 1..27: mol_type = genomic DNA
gtaaggcagcgactgggttccctgtga

SEQ ID NO: 1404 - DNA, 219 bp, Homo sapiens
  source 1..219: mol_type = genomic DNA
tgacttacagtagatcagaactctgttcccagcataagatttgggggaacctgatgagttttttttttgcatctttaataatttcttgtatgttgtagagtatgttttaaaataaatttcaagtatttttttaaaaaactaacacagctaatatataagagcaaagtggacagctgcattcttttattcctctttgtaagtacaaccacttagcacagc

SEQ ID NO: 1405 - DNA, 37 bp, Homo sapiens
  source 1..37: mol_type = genomic DNA
atgtcattctgtatcctggcctgattatatcagagac

SEQ ID NO: 1406 - DNA, 217 bp, Homo sapiens
  source 1..217: mol_type = genomic DNA
gaacttttaggggattctatagacaaaacattttttagctttggagggaaaaaattggtttcattctcaaaacgggggaatggagaagtaagagaagggagacgagtgaatgaaggaaaaacaaattaggcagttaacacatacaaagtatctacctctgagctctgcctggagttaggaaaggctgttcactgatcttgttcttttgagccatcca

SEQ ID NO: 1407 - DNA, 207 bp, Homo sapiens
  source 1..207: mol_type = genomic DNA
gcctctcttgttaggagatcatctgaagaactagggttacggtgctgccagctgactaatgactgtttttcagttttgtcaggaaacagaattaccactcaccttaattttgtagcttgtacccaagtttgtgatgtcaattgccaagactaaggaatgaaacgtcttcatacgaggtcatcccggagccaactcattgcctgcttt

SEQ ID NO: 1408 - DNA, 1252 bp, Homo sapiens
  source 1..1252: mol_type = genomic DNA
ttgtcgtgctccttccaattgtgtaagattagttagcacatcatctcctactttagccatccggtgttggatttaagaggacggtgcttctttctattaaagtgctccatcccctaccatctacacattagcattgtctctagagctaagacagaaattaaccccgttcagtcacaaagcagggaatggttcatttactcttaatctttatgccctggagaagacctacttgaacagggcatattttttagacttctgaacatcagtatgttcgagggtactatgatattttggtttggaattgccctgcccaagtcactgtcttttaacttttaaactgaatattaaaatgtatctgtctttcctagtatgtttttatcttctcatgtattatccatggttttctctgtttgtgacagattagtaaaatttaatgagccctctttcttgtggccgtttctccatagttttaggttttgatatgtgtttactagcttgcctgtgtctggtacatctcatgacctcaattccctcacctgaaataggaaatgagaatgtttcattgtagccccaagcggtcatgtcaacctagtgcctagtcataattaattgacttttcctgtattacttctttttttaagtataaaccaatgatcctttggtagtcaagaactcttaggaacattgccttttggacatgtaaaatatttaggatttgaccacacaatggctatgaaaatgcaagtagtttcctcgcgtgacctcaccatgattcacatacgtgccactgtttgaaatctggtctgtttgcatttctgttatgacagagagatgatgtttgcatttctgttatgacagagagatgatgaaagtaggcagggctgtgttcctttgtgtagcctgtatatattttccatatgtagagccctgattaacttcaaggacaaacactggctggagaaagccagactgatgggaatgagactttggccaaaaatcccaaaacatcattttcaatcagtagagaagtgcttagggttgaaaattgatttcatttgctactgaatttggtaaatcctgggtaacttttatcaagatgaagacattttaccctacctactctagaaatatacaacaatgttatattttacactccttggaaacatttgaggaaaaaaatgcaatttgcacttcactttgttggaatatcccatagcactcaataaactcagctgctagagtgccgatgtca

SEQ ID NO: 1409 - DNA, 118 bp, Homo sapiens
  source 1..118: mol_type = genomic DNA
gacctttctttgtgttatctgcatgttgtaacgtgtgataagaatgaatgtaaaggctgtggcaactgtaattaatttttgtaaagggctggtcacacgtggatctggtttatgaatg

SEQ ID NO: 1410 - DNA, 32 bp, Homo sapiens; identical to SEQ ID NO: 11
  source 1..32: mol_type = genomic DNA

SEQ ID NO: 1411 - DNA, 70 bp, Homo sapiens
  source 1..70: mol_type = genomic DNA
cagggatttgaaccgcgctgacgaagtttggtgatccatcttccgagtatcgccgggatttcgaatcgcg

SEQ ID NO: 1412 - DNA, 54 bp, Homo sapiens
  source 1..54: mol_type = genomic DNA
ctggactccctcaagtacagtgacctgcagaacttagccaagagtctgggtctc

SEQ ID NO: 1413 - DNA, 43 bp, Homo sapiens
  source 1..43: mol_type = genomic DNA
ttaaaagccttgaaaggctacattaaacatgaggcaagaaaag

SEQ ID NO: 1414 - DNA, 120 bp, Homo sapiens
  source 1..120: mol_type = genomic DNA
tcttgtgatgagactgagatacagatcagcaaccaggaagaagctgagagacagccacttggccatgtcaccaaaacaaggagaaggtgcaagactgtccgtgtggaccctgactcacag

SEQ ID NO: 1415 - DNA, 56 bp, Homo sapiens
  source 1..56: mol_type = genomic DNA
aactgaaaataaaccacctatgccaaaattggcatacttttatggagatttctttt

SEQ ID NO: 1416 - DNA, 26 bp, Homo sapiens
  source 1..26: mol_type = genomic DNA
aaataagtaatcccactgaattccag

SEQ ID NO: 1417 - DNA, 50 bp, Homo sapiens
  source 1..50: mol_type = genomic DNA
tcagagctactgcaaaagttccttctccaccagacgagcaccaagaagct

SEQ ID NO: 1418 - DNA, 26 bp, Homo sapiens
  source 1..26: mol_type = genomic DNA
acagagattcaaaggtaccttcagaa

SEQ ID NO: 1419 - DNA, 25 bp, Homo sapiens
  source 1..25: mol_type = genomic DNA
ccattgatcaatatattgagagaaa

SEQ ID NO: 1420 - DNA, 26 bp, Homo sapiens
  source 1..26: mol_type = genomic DNA
cagcccatcaataagggaggggtcag

SEQ ID NO: 1421 - DNA, 79 bp, Homo sapiens
  source 1..79: mol_type = genomic DNA
tgtggcttctactcccatcagccaacgacgctcgcaaggccggtcttgtggccctgcaagtcagagtaccttgggtctg

SEQ ID NO: 1422 - DNA, 72 bp, Homo sapiens
  source 1..72: mol_type = genomic DNA
ctaaagataatgagcataagcgttcactgaccaagactccagccagaaagtctgcacatgtgaccgtgtctg

SEQ ID NO: 1423 - DNA, 43 bp, Homo sapiens
  source 1..43: mol_type = genomic DNA
tgcttgggacacacaaattaaagaccatcacggggaattctgc

SEQ ID NO: 1424 - DNA, 88 bp, Homo sapiens
  source 1..88: mol_type = genomic DNA
cccattcaagttgacaactgaggcaacgcagactccagtctccaataagaaaccagtgtttgatcttaaagcaagtttgtctcgtccc

SEQ ID NO: 1425 - DNA, 56 bp, Homo sapiens
  source 1..56: mol_type = genomic DNA
accatgggggcaatctaaagaaaataattatctaaatcaacatgtcaacagaatta

SEQ ID NO: 1426 - DNA, 86 bp, Homo sapiens
  source 1..86: mol_type = genomic DNA
agcaacggaagaaacgcgagcaagaacgaaaggagaagaaagcaaaggttttgggaatgcgaaggggcctcattttggctgaagat

SEQ ID NO: 1427 - DNA, 470 bp, Homo sapiens
  source 1..470: mol_type = genomic DNA
cccactttagtcacgagatctttttctgctaactgttcatagtctgtgtagtgtccatgggttcttcatgtgctatgatctctgaaaagacgttatcaccttaaagctcaaattctttgggatggtttttacttaagtccattaacaattcaggtttctaacgagacccatcctaaaattctgtttctagatttttaatgtcaagttcccaagttccccctgctggttctaatattaacagaactgcagtcttctgctagccaatagcatttacctgatggcagctagttatgcaagcttcaggagaatttgaacaataacaagaatagggtaagctgggatagaaaggccacctcttcactctctatagaatatagtaacctttatgaaacggggccatatagtttggttatgacatcaatattttacctaggtgaaattgtttaggcttatgtaccttcgttcaaata

SEQ ID NO: 1428 - DNA, 185 bp, Homo sapiens
  source 1..185: mol_type = genomic DNA
tacatagccctatcgaaatgcgaggattaatgctttaatgcttttagagacagggtctcactgtgttgcccaggctggtctcaaactccaccaaatgtacttcttattcattttatggaaaagactaggctttgcttagtatcatgtccatgtttccttcacctcagtggagcttctgagtttta

SEQ ID NO: 1429 - DNA, 92 bp, Homo sapiens
  source 1..92: mol_type = genomic DNA
atggccgcttcagacccacagcaaagatttttgataaggcatgactcctaaacggatgaatgagtgccccattagagccaagattcttttat

SEQ ID NO: 1430 - DNA, 33 bp, Homo sapiens
  source 1..33: mol_type = genomic DNA
cttgaatccgtgaggcagatgtagtgagcagag

SEQ ID NO: 1431 - DNA, 150 bp, Homo sapiens
  source 1..150: mol_type = genomic DNA
tagccaaagtctaagcagaagcccctgcgaccattccaacactgacagaacattcctctgccttgttttacggatacattggggaaacttaaggatgagaactttagaaatggtatttcttggaaacccacttgcttgtaaatcagtggt

SEQ ID NO: 1432 - DNA, 296 bp, Homo sapiens
  source 1..296: mol_type = genomic DNA
tggtatctggtgttaaggcagtgccgaatggagggcaggaaacacatttttaaatatttatggatttatgtatttttctcataaagacagggtctccctatgattcccaggctctccttgaacgcctaggctcaagtgatcctcccacctcagcctcccaaagtgctgggattacaggtgtgagccaccagattatatttatttctattcgctgtatttaattcttaaccccatgtttattttacataacttccctatttctcaaaaagaatttaaggcctattctcaaaataatg

SEQ ID NO: 1433 - DNA, 34 bp, Homo sapiens
  source 1..34: mol_type = genomic DNA
ttatgaaccattaagacaaattagaccaggcatg

SEQ ID NO: 1434 - DNA, 183 bp, Homo sapiens
  source 1..183: mol_type = genomic DNA
cccagggcacctacatatccagatagacataaattcctcactcctaagaaaaccaggcttacaaggcgtcaaggccctataaagaggaaaaacccaggacggtccttagaggcttccttcagcatgaaaaccaagttaaagccagagctcatcctgggttgcagcaagtcatggttgggccca

SEQ ID NO: 1435 - DNA, 26 bp, Homo sapiens
  source 1..26: mol_type = genomic DNA
gctgcttcccgtccgctgtcctctgc

SEQ ID NO: 1436 - DNA, 29 bp, Homo sapiens
  source 1..29: mol_type = genomic DNA
gggcaaagcccatctggtccgccgagcag

SEQ ID NO: 1437 - DNA, 211 bp, Homo sapiens
  source 1..211: mol_type = genomic DNA
acagctgccagacttcggtaaatcaagggggcgccccctggagaccagaattttctggtacccctggggatccggcttcaagatcgctgctaccagtgggcactcaaaacggggtgcccatgggtcccaggtacaagcccggccgaacgtatctgaagccccaggaaacacgtggcacaaattccgggagaaactgttagcccggaagata

SEQ ID NO: 1438 - DNA, 71 bp, Homo sapiens
  source 1..71: mol_type = genomic DNA
agcatttgtacacctaagctcggtcttcctgcaacactttgcgccttcccgacctcagagacgtccgtctc

SEQ ID NO: 1439 - DNA, 31 bp, Homo sapiens
  source 1..31: mol_type = genomic DNA
agctattgggagtggcggatcctcccacccc

SEQ ID NO: 1440 - DNA, 98 bp, Homo sapiens
  source 1..98: mol_type = genomic DNA
tggcactcatcttccgccacctgtccctgagagaccgtgctgccgccgccagggtctgcagggcctgggccgccgctgctacctgcagcgccgtgtgg

SEQ ID NO: 1441 - DNA, 208 bp, Homo sapiens
  source 1..208: mol_type = genomic DNA
acttcccacgggtcactcagctagggaatggcagaggcagaattcgaacctagcagtccggaggccatgccaagactccttagagacagctgagaaagcccagttcctaaaatatcattggctctccatgtccaggtttcatcctgtggcagacgccactgaaatcttctaaaaggataggatgcgagttccctcctttggggcaaca

SEQ ID NO: 1442 - DNA, 25 bp, Homo sapiens
  source 1..25: mol_type = genomic DNA
aggccttttctgcacggctctaacc

SEQ ID NO: 1443 - DNA, 305 bp, Homo sapiens
  source 1..305: mol_type = genomic DNA
agtgccgcggagaaaaaccgctcttcgacgcgggccgcgacgtcctggaggctgtgcacgctgtatgcggggcggccagccagctacgccacctcgacctgcggcgcttgtccttcacactggacgacgcgctggtgctgcaggcggcgcgcagctgtcccgagctccacagcctttttctggacaacagtaccctagtgggcagcgtgggtcccggctcagtgctcgagctactggaggcctgcccgcgcctgcgcgctctcggcctgcacctagccagtttgtcgcacgccatcctcgaagca

SEQ ID NO: 1444 - DNA, 116 bp, Homo sapiens
  source 1..116: mol_type = genomic DNA
gcgccccgagtgctagtgccttcttttgggattgttgccccccgggtctttaccgagttgggaactgtgatggcatcgggaccagtcctgggcgccctgagaccactcgctgctct

SEQ ID NO: 1445 - DNA, 25 bp, Homo sapiens
  source 1..25: mol_type = genomic DNA
acactgcccccctctcttgcctcca

SEQ ID NO: 1446 - DNA, 30 bp, Homo sapiens
  source 1..30: mol_type = genomic DNA
gtgagtgtgaaataaacaaatcctgcagtg

SEQ ID NO: 1447 - DNA, 30 bp, Homo sapiens; identical to SEQ ID NO: 1027
  source 1..30: mol_type = genomic DNA

SEQ ID NO: 1448 - DNA, 270 bp, Homo sapiens
  source 1..270: mol_type = genomic DNA
atgggccttggtcacactccttggcttctcccaccgcaagcaacgctgcctgcctctgccgctcctccacatcttgccgctgcccagcagagctggcttctgggtccacctgagcactggacggtgctcccagggcgttggagcaggcggaggggtgtgtggccaggtactaggaggcaccaggaaatcccgcggggtggcccatgcagaccaggcgcacgtggctcatggggcagaattgccaaggacagctcacgacagtgccacctt

SEQ ID NO: 1449 - DNA, 58 bp, Homo sapiens
  source 1..58: mol_type = genomic DNA
aatgtgcacaggctggtcaacgacctgcgctactacagactctgcaacgacagcctgc

SEQ ID NO: 1450 - DNA, 2412 bp, Homo sapiens
  source 1..2412: mol_type = genomic DNA
ttagtctcagccatggaggtcccgagttcctggctctgcagcccctccatttgtcttggcatctttgttcatacccaggaccctgccgttctccctcctgggtgatgagccccggtggggccagcattggagtgtgcccaggcttgcattcaggctgagatggttggtgcttgggagctgcacttctgggtccccagggttagaggtgggacccaggttccccggctgtcttgggctctttccagaccagccccagctcagcttgggctgagttgctgccaggtcctgggaggagccctcctagtactcaccctcttgtcccactgctgccacctgtgcagggactgtcaggtgggctgtccccacccgtgcagcacctcggtgggagctgggtgctgctggctcttggtgtccatgaggccatcttgttggagcctgacagtgcctgggacctccttccccatggggctcacctgttctcttcttcctgtgtcaggtgaccaggcctctctcttgcctgataggaacttctgggaacttttccttgtaccgttttatacttgatgaaattaggaaaagaaatcgctttctccctggtcctcttggggttcttgacctgagtcctctgtgaagcagcttgtccacggctccaccgtagtgctcagatgcacacactgctctcactggtgcaaacctggccgcctgctttcctcatttgccacgtgtggcagggaagcttttgcttagactcatcctgttctcctttgtcttggggtcttccttttcttgggacttgttctctcctaagcctcttccagttcacttcagcccctggatatgttttttcctttttctagaggccagatcctaatacttaatgatcagcttctaacgacatcaatatcagtcaactttttgatttaaagctgtggtttcaaaatctagttataggccaggcgcggtgtctcacacctgtaatctcagcactttgggaggccaaggcgggcggatcacttgaggttagggggtttgagaccagcctggccaacatggcgaaaccctgtctctactaaaaataaaaaaaattagtcaggtgtggtggcacacgcctgtaatcccagctgcttgggaggctgaggcacaagaatctcttgaacccgggaggcagaggttgcagtgagcggaggttgtgccactgcactccagcctgggcggcagagtgggactttgtctcaaaaaaaaaaatctagttatatcagaagcacctggggtacttattaaaaatggagaaacagacttctgtgttctacccaggaaattctggtttggcatttgggagccactgatttaaaagacatcccttagttggttttttgagggtaaaataaaagaatcaccaccttccattcagtcacgcactgtgtgtttgaagccagctgcttctcaagccccgggccaggaactggggcaccagtcccagccttcaccaagtctttcatggtagacaggccaatacagcaccctctgtggaccacatagtgccaagcatgtgacatgtcttggctcgagtaagccttctaacaagcctctgaagtgtgggtcctgttactcccccatttcacagatggtgggggctcagaaggtgagcagttcacagaacttggaagtggtagagctgcgaagcaggaggcagacctgggtgttctggccccagagcctgcacacactccccagaagcagattgctcaggacagaggcgctgagctggctgctggggccaggaaataggaggcatctgtgcagactttgggaagaggcaggctttgaatggagttctggaagaggaatagtggttgggcaggaaaatgaacttggtcctgctcatggctctgctggggcttgctgggcctgtttgagtcctcaccgggacctacactgaaaaaaaaagcagggtctcaccgtgtgcatgatggcggaggtcagggcctcacttctggcccagggccttccatggcccacgctgcgcccagtgggacaggccttgggactgtgtttgctgctgctcgggtggctctcgaggggcaggggcggcctggagccccgtgggtaaaggttctgcagacattgctcggtgtgcgcgtcacctcaaggggccatggtgaagaagagggctgtcaccacagccatgtctgcgtttgaggggccggactcaggagcaagtgtgctggtctcttcagtgtgagctggggccagcttcttcatggtgcagcgctttggtctttctgtccttagactagtggttctggtagggcttggtggcagccttgtggtgaggactcagtgagttgatgtctgtatgttgattgcagcagtgtctggcacccgagaggccctagggacgtattcctcttg

SEQ ID NO: 1451 - DNA, 161 bp, Homo sapiens
  source 1..161: mol_type = genomic DNA
aggtcctggtccacaagtcccatgatcttctgcaggaggagattggcatcgccatctacaacatggcctcagtcgactttgatggcttctttgccgccttcctcccagagttcctgaccagctgtgatggtgtggatgccaaccagaaaagtgtgctgggg

SEQ ID NO: 1452 - DNA, 74 bp, Homo sapiens
  source 1..74: mol_type = genomic DNA
gtcctttctccagcccgacatccacctttttaaacaaaatctcttctacttggagactctcaacaccaagcaga

SEQ ID NO: 1453 - DNA, 111 bp, Homo sapiens
  source 1..111: mol_type = genomic DNA
acaggactgagcttctgtgcctggactgaactagtaacttttacacccaggaattccaaagcagtttaaaaatactttgcttagcccccaggcagaggcttaacctccagg

SEQ ID NO: 1454 - DNA, 79 bp, Homo sapiens
  source 1..79: mol_type = genomic DNA
gccgagctgtttgagctccttttccggacgctccatcacaactggaggtacttcttcaagtccaccgtgctggccagtg

SEQ ID NO: 1455 - DNA, 149 bp, Homo sapiens
  source 1..149: mol_type = genomic DNA
gagcagttagccgagagcatcctccacgagggcagcacaggctgccgggtggtggagaagtttctgaagatcctgcaggtggtggtccaggagccaggccaggtgttcaagcccttcctccccagcatcatcgccctgtgcatggagca

SEQ ID NO: 1456 - DNA, 93 bp, Homo sapiens
  source 1..93: mol_type = genomic DNA
actgatgagatgctgagcttcttcctcactctgtttcgaggccttagagtacagatgggtgtgcctttcactgagcaaatcatacagactttc

SEQ ID NO: 1457 - DNA, 94 bp, Homo sapiens
  source 1..94: mol_type = genomic DNA
accagacactcagcgtcttagaagatattgtggagaatatctcgggggagtccaccaagtctcgacagatttgctaccagtcgctgcaggaatc

SEQ ID NO: 1458 - DNA, 285 bp, Homo sapiens
  source 1..285: mol_type = genomic DNA
catttttgaagcgtccaggcctgttttcttgtcatatgtctcctagtcttgttttgcctgattgtttccataggttgtggtgtagtggtgcatgttcgtgttcgcatttcctcttgcattgcttctgtttgtcccatccttggtgatgctcagtctggatgcctgttgggagtagggcctgccagtctgtccattgggaaggtgcttggcaggtgtaattgctcaggactgtagagaaagtgggcgaggtcaagagttggacttgggtctgaatggctccagctc

SEQ ID NO: 1459 - DNA, 75 bp, Homo sapiens
  source 1..75: mol_type = genomic DNA
agcagtggcccgtgcgctccatcaaccacgccagcctcatctctgcactctcccgggactatcgcaacctgaagc

SEQ ID NO: 1460 - DNA, 59 bp, Homo sapiens
  source 1..59: mol_type = genomic DNA
ccaggtgttggtgtgccgagccctctctaacatcttgctgcttccgtggccaaaccttc

SEQ ID NO: 1461 - DNA, 136 bp, Homo sapiens
  source 1..136: mol_type = genomic DNA
agctgctgctatctgcgtgccacttactggtctcactggccaccaccgtgcggcccgtctttctgatcagcatccctgcagtgcagaaagtattcaacagaatcactgatgcctctgccctgcgacttgtcgataa

SEQ ID NO: 1462 - DNA, 495 bp, Homo sapiens
  source 1..495: mol_type = genomic DNA
gggcaaaatgctatgaaacggcaccgcatgctccagagaaatatttcatgaaaggaagtcaatcgatgcagcaaacttcattgttgtcttattttaagtaattgccacagccaccccaactttgagcaaccaccaccctgttcagtcagcagcagtcactttcaaggaagacccttcaccagcaaaaagattaccgctctgaaggctcagatgattgttagcatttttagcaataaactactttttaactaagatatgtacattgttttcttagacataatgcttattgcacactttatagactatagtgtaaacaaaacatatgcattgggaaacaaaaaaattagtgtgccttgcgttattgcataatttgctttattgtggtggtctggagctgaacctgcagtatctctgaggtatgcctgtatatccttccagacttttttctctttttatgtaataagtaataactaagtttgtagatagctggagata

SEQ ID NO: 1463 - DNA, 75 bp, Homo sapiens
  source 1..75: mol_type = genomic DNA
gttgtagcctacatgcattcagatacaactttacttttttagttatctgagttccacatgaatacatgctcactg

SEQ ID NO: 1464 - DNA, 101 bp, Homo sapiens
  source 1..101: mol_type = genomic DNA
ggcttactctcactggttagcacagtattgcagtgaagttcaccggcagaacacgcagcagttcgtgacactcatctctactaccatggatgcaatcacac

SEQ ID NO: 1465 - DNA, 173 bp, Homo sapiens
  source 1..173: mol_type = genomic DNA
gaggaccttttgcagatccagatcttaatttttttaaaagcatgtcctacaatctggatttgtctaattatttccattatattagattcagtttaaacatttttagcaaggttactacataggcaatgatgtgcctttcctcttgcatcatgtcagaaggctcttaatatcaa

SEQ ID NO: 1466 - DNA, 82 bp, Homo sapiens
  source 1..82: mol_type = genomic DNA
tttcagccttgaggagctctacagatgtgctagattgactgaaattcttactcctaaggctgactttgatgtcctttctctt

SEQ ID NO: 1467 - DNA, 73 bp, Homo sapiens
  source 1..73: mol_type = genomic DNA
tcaaagtcactctgtacggatctcagataaaattgtacaacattgaaactgctgtgccatcagtattgaaacc

SEQ ID NO: 1468 - DNA, 33 bp, Homo sapiens
  source 1..33: mol_type = genomic DNA
gatatatcttatctgttcagttggcggggcgca

SEQ ID NO: 1469 - DNA, 104 bp, Homo sapiens
  source 1..104: mol_type = genomic DNA
aacatcacggcggagaacgactgccggcggctgcactgctccctgagagacttgagctccctgctgcaggccgtgggccgcctggccgagtactttatcgggga

SEQ ID NO: 1470 - DNA, 38 bp, Homo sapiens
  source 1..38: mol_type = genomic DNA
tttgaagaagttgtgttgaaaagtaaggaaatttcaga

SEQ ID NO: 1471 - DNA, 87 bp, Homo sapiens
  source 1..87: mol_type = genomic DNA
gcctgtgtaaatgggcgccagccgcgattcttgtctactcctggtgctgtgaccgtgtatgacaatgggatgcacattttggccagc

SEQ ID NO: 1472 - DNA, 27 bp, Homo sapiens
  source 1..27: mol_type = genomic DNA
cttcttatgggatctgtcccggctctg

SEQ ID NO: 1473 - DNA, 33 bp, Homo sapiens
  source 1..33: mol_type = genomic DNA
tttaaaggcttatgatgaaaagctgtgggggag

SEQ ID NO: 1474 - DNA, 65 bp, Homo sapiens
  source 1..65: mol_type = genomic DNA
tgttcttcaggacaatttagaagtttatttgggattacaacagtttatagtcacttcagggtcag

SEQ ID NO: 1475 - DNA, 56 bp, Homo sapiens
  source 1..56: mol_type = genomic DNA
tcctgctcacagaggtgttgaatcgaatccagttcagatacaaccaagcccagctg

SEQ ID NO: 1476 - DNA, 36 bp, Homo sapiens
  source 1..36: mol_type = genomic DNA
ttgtttggatatctggacgctgtttttggactatct

SEQ ID NO: 1477 - DNA, 35 bp, Homo sapiens
  source 1..35: mol_type = genomic DNA
gtggttaatggaatgaagggttgcctgtcctgtag

SEQ ID NO: 1478 - DNA, 162 bp, Homo sapiens
  source 1..162: mol_type = genomic DNA
agccttctagacttgccagattgaaatgacacagtgatctgcccatcaactttttatcatttcccttcactttaattgggtcacaacacaaatgacttagaaaatgtgagcgcactagattataagaagccttagcagacagtgtctgaggattaaagttgc

SEQ ID NO: 1479 - DNA, 179 bp, Homo sapiens
  source 1..179: mol_type = genomic DNA
caggagcaacatgggacattttatttccgggccagttttgcttttctgagtagtagttttctctgcttttattatttcacatatctctgttttgaaaaatagcttttgcagtaatgagcttcagaattgcttttagccattatttcattttcagctaaggcctagtatgtctttacctt

SEQ ID NO: 1480 - DNA, 612 bp, Homo sapiens
  source 1..612: mol_type = genomic DNA
aaaaccgtgatgtttgctctgtataagaacacaatctgatatggtaatatgttcttaaaaattatttggtgatagctttccatatgaattcaaaggcatcattattcacactttcatattctttctgtctgtggttaagaaaggctgtattaccttttttttaatgatctgtgtgtctcatgtctatctcttcatatgttaatttaaaaatctagctgcttgtatcaactatcaaatatcagttgttttgactttaatcataatgtagtcacagacaactttgttgtggcttccatttggatggtatagaaatgtcattatggattgtctatgtactgatgttgttacgtgtaacttttgtgctcttggttttacattttaatcctgtgcttcctattgccctgtgaaagctgagaggtgcctgggagcagaaaggtgacataaataatgctgtgtgcttgcttcctggctctgggtcccctaccactaattctaaacagctcagtccattctcagttgtttaggagctgctaaccagatccttggcttctctttccctctactgccttttcccctaactttctactgttcattagcacctgtaccagaagg

SEQ ID NO: 1481 - DNA, 224 bp, Homo sapiens
  source 1..224: mol_type = genomic DNA
ttgttattgtcctctcaagtggagcctacaatgacctacttttttttttttttaaaagcactctaaaagacgactccatcacagtactctgaggcagggtttcatgatttatgtctcttgcagatgaggtcatttatgtatcttacaactgctgctgtatgaaaacaggagggaatttggaaacttatattatgaacaatcagattgacggtttagggactttc

SEQ ID NO: 1482 - DNA, 32 bp, Homo sapiens
  source 1..32: mol_type = genomic DNA
gagactgctgctcctgcgtagccaagaacagg

SEQ ID NO: 1483 - DNA, 113 bp, Homo sapiens
  source 1..113: mol_type = genomic DNA
acagaaaggtaggtgtgtgccagtaagtctgagattagctggaagggcttgggtggttaagggaagtgactgagtttgaaaaatgcttgtgccttgtgtaggtttgttgtctt

SEQ ID NO: 1484 - DNA, 32 bp, Homo sapiens
  source 1..32: mol_type = genomic DNA
tgctgtgctgcatggcatctgtaatcctcttt

SEQ ID NO: 1485 - DNA, 29 bp, Homo sapiens
  source 1..29: mol_type = genomic DNA
atcaatgaactcatgtccaagaactgtgt

SEQ ID NO: 1486 - DNA, 161 bp, Homo sapiens
  source 1..161: mol_type = genomic DNA
agctagcgcaccctcttaattcctacgtctgtttagtcttgagtctctatgtaatttgatgccagtgtgtccttttgctacagcttctccattccttaattctttattttgatttatctctttatctgtgtggtttctttgtctgttatcctccttgagaa

SEQ ID NO: 1487 - DNA, 26 bp, Homo sapiens
  source 1..26: mol_type = genomic DNA
ggagggttgaagtgggagaatggctt

SEQ ID NO: 1488 - DNA, 396 bp, Homo sapiens
  source 1..396: mol_type = genomic DNA
gtcttttctgtttgatgagagcctcatgacaaggtgtaaagggtaagaataaacagaaagcaaaccacaacatgagacaggaaggtaggaggagaggggagtgccctgggtgactggggtggctgctgtgtgctgctgtgatacctgtttgctagggagacatgtatgcaatgcctggccgtgaggccctgagggtgccgggagcctgggcttgctacttgagggaatcttgtagtgaaaagaagtttttatctctaactcctttatccaggcttcttcttggatgtctaggaactttctttatatctccagtttagtgcttggcatgtggtgggcacttaaagttggctgaaagaaccattgatttaaagtaaacttgggttagtgcaatggctc

SEQ ID NO: 1489 - DNA, 27 bp, Homo sapiens
  source 1..27: mol_type = genomic DNA
tagaccatctctggattacttctaata

SEQ ID NO: 1490 - DNA, 82 bp, Homo sapiens
  source 1..82: mol_type = genomic DNA
atggaaatccgtagctgtctgcccaaactccttttggctcaccataaaaccttaccttactttatccggaacaagctctgca

SEQ ID NO: 1491 - DNA, 55 bp, Homo sapiens
  source 1..55: mol_type = genomic DNA
gcctctctcagggcattggaaagtctgatgacagaattttttcacgattgtacaa

SEQ ID NO: 1492 - DNA, 30 bp, Homo sapiens
  source 1..30: mol_type = genomic DNA
gagtgatttatctgattggtacaccaggga

SEQ ID NO: 1493 - DNA, 44 bp, Homo sapiens
  source 1..44: mol_type = genomic DNA
tctcaagcttcatccgtgtggtggcgtgtgtcagagcttccttc

SEQ ID NO: 1494 - DNA, 47 bp, Homo sapiens
  source 1..47: mol_type = genomic DNA
agtggagtcatgaagtatttggcctgttgtgactgccttatttcaca

SEQ ID NO: 1495 - DNA, 379 bp, Homo sapiens
  source 1..379: mol_type = genomic DNA
ggcctgtcagcctccgcccgttcagcctcggggccggggccgccgccacctctgcccgcggaggccggggagcccctgcctgggcccgcagcctcccccgcgggggtcgggcccgggcgggggtcccgagcagctgccctcctcgccggcatccgagcctcatttcctgctttttcagtttccttggggaggggcgggtgggtctggatgaattgtctcggggtcccccgatgaggcgacccgggcggccctgccctttttagagggtcccctcggggcccggtggggaaggggttgtctttgcatgggtgggggacttcccgagtctgccgggaccatgacctgaactgtgcgagcgggacgtgtccgaagcccaaga

SEQ ID NO: 1496 - DNA, 389 bp, Homo sapiens
  source 1..389: mol_type = genomic DNA
tgctttgtgatagggagagttatttctaagggaaaggaatgtaccctgtatttctttctttttctttttttttttttttttttttgagacagagtcttgctctcttgcccaggctggaatacagtggggtgatcttggctcactgcaacctttgcctcctgggttcaagtgatcctcctgcctcagcctcctgagtagctgggactataggcgcctgccaccacacccggctaatttttgtatttttagtagagatggagtttcaccatgttggccaggttggtctcgaactgctgacctcaagtgataaagtgctgggattacaggcatgagccaccacgcccagcccgtaccctgtatttcttgaagtgaagaatataaagtctgta

SEQ ID NO: 1497 - DNA, 32 bp, Homo sapiens
  source 1..32: mol_type = genomic DNA
tcacagctcatagtgacctcgatctcctggtc

SEQ ID NO: 1498 - DNA, 353 bp, Homo sapiens
  source 1..353: mol_type = genomic DNA
tgcagagattacctatgttacaggcttaaattatagatgtgaagatggtaaagggagacactattttaatcaaaagcttcctgggtacaaagctaatgagaggaaaaattatacattttatcaagctctttttcaagtaaagaatagctttcttttttcatctggcttcttgcctgaccttctccccttcccctaaatggtgagaggaaggagagcttgcagatagattttccatatcgtaggggatttttatatctgggaagcacagcatttcatatttataggagggtgtatattgccaaatgggatatttggcattacgagtcatttccagctgagagagtaaggatgca

SEQ ID NO: 1499 - DNA, 494 bp, Homo sapiens
  source 1..494: mol_type = genomic DNA
tccctggcgttctgtccaatacacttgccttcaatccaagttgaggacggttatggtaaccctctccaaggctctcttaagtgggcgtcagggaagcccactggagacaggaaagaccaagagggttgggagtctaagtgaacctattcctgggttggttagtggtgcgtcctgtgacaagaagagagggaccttgagacggagagtcacaggcctgatgatagcaggtaaggtggagccacagttccaccgctgggattggtccctttgatgaagaacagaacgtttcctggctacatttgaagtataattatttgtaacaaaagatggatttggaagagagcacttttaggtgaagggcttctggaggtttaaaaaggctaattgtccactgttctccaccacctcccgctttcaaccccttcagtattgactcctttaacctcatgtagctttcgtgactttgaaacaccatgtagtagaaggagccagac

SEQ ID NO: 1500 - DNA, 104 bp, Homo sapiens
  source 1..104: mol_type = genomic DNA
taaattttagcctttctggtagatgtgtagcactatcttattttaaatttgtattttcctgataactaatgaggctgaacacttatttataggctttttgaata

SEQ ID NO: 1501 - DNA, 325 bp, Homo sapiens
  source 1..325: mol_type = genomic DNA
ggatgtaactgctaggccaccttcagttctttgaagttagggaccgtcttactcatcattgtatcccaggggcttaatttaagcaatatcagttacttagtgagtattgaattctcatttctccaacaaatagctgagttgcttagtcactccagaattaaagctaggtttagaataattggagcggtgtgatggcatgtgcctatagtctcagcttctcaggaggctgaagtggggaggatcgcctgagcccaggggtttgaggctgcagtgagctgtgattgttccactgcactccagtctggggtgatacagcaacactctg

SEQ ID NO: 1502 - DNA, 176 bp, Homo sapiens
  source 1..176: mol_type = genomic DNA
ctcccacatgactatggtacagttaccatcttcggttaatagaacattgattcagtactttgatctaacctactaccacctgtattccagttttgtcaattggctcagtcatgcctttcatagcattttttccctccagtccaggatcaatctgtggtcaggtgtagcatttactt

SEQ ID NO: 1503 - DNA, 54 bp, Homo sapiens
  source 1..54: mol_type = genomic DNA
tgcagcatgcttttatagtggttcgtcagtttcatactcattcattacctgatg

SEQ ID NO: 1504 - DNA, 41 bp, Homo sapiens
  source 1..41: mol_type = genomic DNA
atggtgtgtgtgaagacatggaactgttatgtggagagaaa

SEQ ID NO: 1505 - DNA, 281 bp, Homo sapiens
  source 1..281: mol_type = genomic DNA
acagttggtgttacgttagagctaataattatactttagcacgttaacctcagaattctaaggctgagagtcaaacactgctaattcatagaaggcaatagcttgtaataatgaatcataaagctcttctactctttgtagttcagtagataaaaacatctgtctgtagtgaactattttatctgatgggaagaacacccgaggatccgccttcagtatagaatcgaagagaaactgcttcactagctcttttccactagtccgggagtcaccaatcatca

SEQ ID NO: 1506 - DNA, 29 bp, Homo sapiens
  source 1..29: mol_type = genomic DNA
tgaaattgaattaagtttaaggctgggtg

SEQ ID NO: 1507 - DNA, 37 bp, Homo sapiens
  source 1..37: mol_type = genomic DNA
ggctgttccaaaacagtaagttatctctattgattgt

SEQ ID NO: 1508 - DNA, 31 bp, Homo sapiens
  source 1..31: mol_type = genomic DNA
ggaactaagcatggtgggaaatgttcctgct

SEQ ID NO: 1509 - DNA, 156 bp, Homo sapiens
  source 1..156: mol_type = genomic DNA
ctggattgcagaagactcggggacaacatttgatccaagatcttaaatgttatattgataaccatgctcagcaatgagctattagattcattttgggaaatctccataatttcaatttgtaaactttgttaagacctgtctacattgttatatgtg

SEQ ID NO: 1510 - DNA, 432 bp, Homo sapiens
  source 1..432: mol_type = genomic DNA
agtgaccatctcatgggcattgttttcttctctgctttgtctgtgttttgagtctgctttcttttgtctttaaaacctgatttttaagttcttctgaactgtagaaatagctatctgatcacttcagcgtaaagcagtgtgtttattaaccatccactaagctaaaactagagcagtttgatttaaaagtgtcactcttcctccttttctactttcagtagatatgagatagagcataattatctgttttatcttagttttatacataatttaccatcagatagaactttatggttctagtacagatactctactacactcagcctcttatgtgccaagtttttctttaagcaatgagaaattgctcatgttcttcatcttctcaaatcatcagaggccgaagaaaaacactttggctgtgtctataacttg

SEQ ID NO: 1511 - DNA, 85 bp, Homo sapiens
  source 1..85: mol_type = genomic DNA
caagggggagagtgatgacttccatatggactttgactcagctgtggctcctcgggcaaaatctgtacgggcaaagaaacctata

SEQ ID NO: 1512 - DNA, 122 bp, Homo sapiens
  source 1..122: mol_type = genomic DNA
ctggtgtctctcaaaagcctgatcctgccaaaaccaagaatcgccgcaaaaggaagccatccacttctgatgattctgactctaattttgagaaaattgtttcgaaagcagtcacaagcaag

SEQ ID NO: 1513 - DNA, 30 bp, Homo sapiens
  source 1..30: mol_type = genomic DNA
agttcctaaaaagaatgtgacagtgaagaa

SEQ ID NO: 1514 - DNA, 46 bp, Homo sapiens
  source 1..46: mol_type = genomic DNA
ggcagtgtaccactgtcttcaagccctcctgctacacatttcccag

SEQ ID NO: 1515 - DNA, 42 bp, Homo sapiens
  source 1..42: mol_type = genomic DNA
ttagtaacaaagaactgaaaccacagaaaagtgtcgtgtcag

SEQ ID NO: 1516 - DNA, 25 bp, Homo sapiens
  source 1..25: mol_type = genomic DNA
tgatgaagattttgtcccatcagat

SEQ ID NO: 1517 - DNA, 114 bp, Homo sapiens
  source 1..114: mol_type = genomic DNA
acaaactacattggcatttaagccaatcaaaaaaggaaagaagagaaatccctggtctgattcagaatcagataggagcagtgacgaaagtaattttgatgtccctccacgaga

SEQ ID NO: 1518 - DNA, 63 bp, Homo sapiens
  source 1..63: mol_type = genomic DNA
aaaatactgaaggaagccctcaagaagatggtgtggaactagaaggcctaaaacaaagattag

SEQ ID NO: 1519 - DNA, 127 bp, Homo sapiens
  source 1..127: mol_type = genomic DNA
aacaagatgaacaagtcggacttcctgggaaaggggggaaggccaaggggaaaaaaacacaaatggctgaagttttgccttctccgcgtggtcaaagagtcattccacgaataaccatagaaatgaa

SEQ ID NO: 1520 - DNA, 52 bp, Homo sapiens
  source 1..52: mol_type = genomic DNA
gaacaagagctggacacattaaaaagaaagagtccatcagatttgtggaaag

SEQ ID NO: 1521 - DNA, 67 bp, Homo sapiens
  source 1..67: mol_type = genomic DNA
tgactccgtaacagattctggaccaaccttcaactatcttcttgatatgcccctttggtatttaacc

SEQ ID NO: 1522 - DNA, 28 bp, Homo sapiens
  source 1..28: mol_type = genomic DNA
aatgaagagagtgacaacgaaaaggaaa

SEQ ID NO: 1523 - DNA, 51 bp, Homo sapiens
  source 1..51: mol_type = genomic DNA
attaattaaagttctgattcagaggggatatgattcggatcctgtgaaggc

SEQ ID NO: 1524 - DNA, 170 bp, Homo sapiens
  source 1..170: mol_type = genomic DNA
gctttttgaccacgtaggctgtttaaagaaatatgacacggtgttggatattctaagagacttttttgaactcagacttaaatattatggattaagaaaagaatggctcctaggaatgcttggtgctgaatctgctaaactgaataatcaggctcgctttatcttagaga

SEQ ID NO: 1525 - DNA, 131 bp, Homo sapiens
  source 1..131: mol_type = genomic DNA
cctcctctcataacagactatagggaataccatacagataccactgtgaaatttgttgtgaagatgactgaagaaaaactggcagaggcagagagagttggactacacaaagtcttcaaactccaaactag

SEQ ID NO: 1526 - DNA, 111 bp, Homo sapiens
  source 1..111: mol_type = genomic DNA
tcaagggtactattgaagaactggctccaaatcaatatgtgattagtggtgaagtagctattcttaattctacaaccattgaaatctcagagcttcccgtcagaacatgga

SEQ ID NO: 1527 - DNA, 179 bp, Homo sapiens
  source 1..179: mol_type = genomic DNA
ggctcgattgttatttccaccaaaagatgatcacacgttgaagtttttatatgatgacaaccagcgtgttgagcctgaatggtacattcctattattcccatggtgctgataaatggtgctgaaggaatcggtactgggtggtcctgcaaaatccccaactttgatgtgcgtgaaattg

SEQ ID NO: 1528 - DNA, 117 bp, Homo sapiens
  source 1..117: mol_type = genomic DNA
gaccattatcaatttggctcagaattttgtgggtagcaataatctaaacctcttgcagcccattggtcagtttggtaccaggctacatggtggcaaggattctgctagtccacgata

SEQ ID NO: 1529 - DNA, 57 bp, Homo sapiens
  source 1..57: mol_type = genomic DNA
tgtttacttgcttcaaacggaatgacaagcgagaagtaaaggttgcccaattagctg

SEQ ID NO: 1530 - DNA, 86 bp, Homo sapiens
  source 1..86: mol_type = genomic DNA
tctgacatataatgacttcatcaacaaggaacttatcttgttctcaaattctgataacgagagatctatcccttctatggtggatg

SEQ ID NO: 1531 - DNA, 78 bp, Homo sapiens
  source 1..78: mol_type = genomic DNA
aacagatagatgatcgaaaggaatggttaactaatttcatggaggatagaagacaacgaaagttacttgggcttcctg

SEQ ID NO: 1532 - DNA, 74 bp, Homo sapiens
  source 1..74: mol_type = genomic DNA
ccagcacatcaaaggaagctaaagaatactttgcagatatgaaaagacatcgtatccagttcaaatattctggt

SEQ ID NO: 1533 - DNA, 27 bp, Homo sapiens
  source 1..27: mol_type = genomic DNA
gaagagtggaagagttctactccaaat

SEQ ID NO: 1534 - DNA, 38 bp, Homo sapiens
  source 1..38: mol_type = genomic DNA
tggccctctcttctgcgacatcgttttctggaggaatt

SEQ ID NO: 1535 - DNA, 80 bp, Homo sapiens
  source 1..80: mol_type = genomic DNA
aatatcatcaagattgtgggtcttcagtacaagaaaaactatgaagatgaagattcattgaagacgcttcgttatgggaa

SEQ ID NO: 1536 - DNA, 73 bp, Homo sapiens
  source 1..73: mol_type = genomic DNA
tgggagagacaaatatggggttttccctcttagaggaaaaatactcaatgttcgagaagcttctcataagcag

SEQ ID NO: 1537 - DNA, 55 bp, Homo sapiens
  source 1..55: mol_type = genomic DNA
ctccactgagtgtacgcttatcctgactgagggagattcagccaaaactttggct

SEQ ID NO: 1538 - DNA, 120 bp, Homo sapiens
  source 1..120: mol_type = genomic DNA
cattggctgtggtattgtagaaagcatactaaactgggtgaagtttaaggcccaagtccagttaaacaagaagtgttcagctgtaaaacataatagaatcaagggaattcccaaactcga

SEQ ID NO: 1539 - DNA, 72 bp, Homo sapiens
  source 1..72: mol_type = genomic DNA
tgtaaatgccttaattgaaaacccaacctttgactctcagacaaaagaaaacatgactttacaacccaagag

SEQ ID NO: 1540 - DNA, 78 bp, Homo sapiens
  source 1..78: mol_type = genomic DNA
gctgatcagattgtgactaaacttgttgatgttgtgaagaagaagaacaagggtggtgttgcagtaaaagcacatcag

SEQ ID NO: 1541 - DNA, 150 bp, Homo sapiens
  source 1..150: mol_type = genomic DNA
aaaggatttcgtagttatgtggacatgtatttgaaggacaagttggatgaaactggtaactccttgaaagtaatacatgaacaagtaaaccacaggtgggaagtgtgtttaactatgagtgaaaaaggctttcagcaaattagctttgtc

SEQ ID NO: 1542 - DNA, 120 bp, Homo sapiens
  source 1..120: mol_type = genomic DNA
tatacatgtatcacctttcagcctgatttgtctaagtttaaaatgcaaagcctggacaaagatattgttgcactaatggtcagaagagcatatgatattgctggatccaccaaagatgtc

SEQ ID NO: 1543 - DNA, 45 bp, Homo sapiens
  source 1..45: mol_type = genomic DNA
tggctatggagccaaattgtgtaacatattcagtaccaaatttac

SEQ ID NO: 1544 - DNA, 59 bp, Homo sapiens
  source 1..59: mol_type = genomic DNA
tgaaaagatgtatgtcccagctctcatatttggacagctcctaacttctagtaactatg

SEQ ID NO: 1545 - DNA, 63 bp, Homo sapiens
  source 1..63: mol_type = genomic DNA
taatgctgcggacaacaaacaaagggacccaaaaatgtcttgtattagagtcacaattgatcc

SEQ ID NO: 1546 - DNA, 70 bp, Homo sapiens
  source 1..70: mol_type = genomic DNA
caaatgtgggtttacgatgaagatgttggcattaactatagggaagtcacttttgttcctggtttgtaca

SEQ ID NO: 1547 - DNA, 57 bp, Homo sapiens
  source 1..57: mol_type = genomic DNA
gaacatattttgctccgcccagacacctacattggttctgtggaattagtgacccag

SEQ ID NO: 1548 - DNA, 36 bp, Homo sapiens
  source 1..36: mol_type = genomic DNA
cctgtaaatgaaaatatgcaagtcaacaaaataaag

SEQ ID NO: 1549 - DNA, 28 bp, Homo sapiens
  source 1..28: mol_type = genomic DNA
gttcttgagccccttcacgaccgtcacc

SEQ ID NO: 1550 - DNA, 94 bp, Homo sapiens
  source 1..94: mol_type = genomic DNA
ttcaagtggagctctcctaaccgacgcgcgtctgtggagaagcggcttggtcgggggtggtctcgtggggtcctgcctgtttagtcgctttcag

SEQ ID NO: 1551 - DNA, 32 bp, Homo sapiens
  source 1..32: mol_type = genomic DNA
ttaaataggaattcataccagggacaaagcag

SEQ ID NO: 1552 - DNA, 531 bp, Homo sapiens
  source 1..531: mol_type = genomic DNA
ggtcacttatacacgcatttctttaaaatatctgattaggtatttatagtttgaaagagatgatgtttccttgactgagcatcttgagaaatcaagatttagttgacaattagacatgaggagaatagagagctagaagaccttgcataaactgattgaccaagagaatagatacactaatcatgtctacaggaacagaaaataaaagagacagagaagagataataaatctgatggtaaaaaaaaaaaaaggcaggaagattacgaatggcttctactctctgggtgtggtggcgcatgcctgtaatctcagcacttgagctggggaggtcaaggctgcagtgagcctaggtagtgccactgcactccagcctggacacaagagtgagagagaccctgtctccaaaaaaaaatgatttgatcatatatgatttgactgcccccttgtggtaatttacatttgtcaatggtttagggagacttgcctgtataccgggatatacaaatttatgcaagcacgaagacagttta

SEQ ID NO: 1553 - DNA, 177 bp, Homo sapiens
  source 1..177: mol_type = genomic DNA
atcggcccgtttcctattatggaagatttaggtcatttccatgttataaataatattgaggtgattattttggagtataaaacaagaatgtttatattatgatctattacctaacaaataattttgctcattatatagtaaattgtgttttatcacaaggctataaacagcatgttc

SEQ ID NO: 1554 - DNA, 67 bp, Homo sapiens
  source 1..67: mol_type = genomic DNA
gctcatttgtattctagatttctgatagatcccttcttccctaatatgatccctaatatgaatcttc

SEQ ID NO: 1555 - DNA, 51 bp, Homo sapiens
  source 1..51: mol_type = genomic DNA
aaataaagcatgagtacatttttagtggcttaatatcaacttctattgcag

SEQ ID NO: 1556 - DNA, 49 bp, Homo sapiens
  source 1..49: mol_type = genomic DNA
cttaaattattaatcatgatttatctttacatatatgtgttcttattgt

SEQ ID NO: 1557 - DNA, 93 bp, Homo sapiens
  source 1..93: mol_type = genomic DNA
ttgcatgcgctctattccccctctgcctctccccaccttctttggagcaaggagatgcagctgtattgtgtaacaagctcatttgtacagtgt

SEQ ID NO: 1558 - DNA, 129 bp, Homo sapiens
  source 1..129: mol_type = genomic DNA
gtgtctattgcaggagaaacgtcccttgccactccccactctcatcaggccaagtggaggactggccagagggcctgcacatgcaaactccagtccctgccttcagagagctgaaaagggtccctcggt

SEQ ID NO: 1559 - DNA, 30 bp, Homo sapiens
  source 1..30: mol_type = genomic DNA
gtggtttcttcccacaagagagaaatctaa

SEQ ID NO: 1560 - DNA, 33 bp, Homo sapiens
  source 1..33: mol_type = genomic DNA
caatttccacatcaatgtagaagagtcagtgga

SEQ ID NO: 1561 - DNA, 243 bp, Homo sapiens
  source 1..243: mol_type = genomic DNA
ttgagtaggcttcattcagggcatgtctctcccccaggccccatcttcatacacttccgctaagatgcccacaattcatcccccttcatgtgcagcttgaaaaaccctgacattgttgctccctgccgggcatacctgccattgccactgcccatctctgtgatgaggaattcaacaccagatctctggcagctcttgagggattggccagtggccattctcaggggtgctgtctagttttcc

SEQ ID NO: 1562 - DNA, 26 bp, Homo sapiens
  source 1..26: mol_type = genomic DNA
gatggctggcattgccatcagggaag

SEQ ID NO: 1563 - DNA, 645 bp, Homo sapiens
  source 1..645: mol_type = genomic DNA
aggatctggactcctcactctggtccttggctgttacctgggacaggtcacttcctctctctggatccgtgtttcttctgtaaatgatagaggctgggctagtggtagttaagatctagtgctcattccattctctgcatgagatagatgggtattcttgtagttcagaatcttgaccagctcagtggctcatgcctgtaatcccagcactttgggagtccaaggcgggtggatcacttgaggtcaggagttcgagaccagcatggccaatatggtgaaaccccgtctctactaaaaatacaaaaattagctgggcgtggtggcgggtgcctgtaatcccagctactcgggaggctgaggcacaagaatcacttgaacccgggaggcggaggtttcagtgggctgagatcgtgccactgcactccagcctgggcgacagagtgagattccgtctcaaaaaacaaaacaaaacaaaacaaaatctgtctacttggggatagcaggcctggatgggctagcaggatgtcccacccctagaggagtcagatgtgtgggtggtggtggtgtagggtctgaagaacactgcatagctatctacatgagcttcccttacggacacttgagcttgtgccctttgcttaaatc

SEQ ID NO: 1564 - DNA, 140 bp, Homo sapiens
  source 1..140: mol_type = genomic DNA
agagtgccgctatgccacgcagctgcagcagatccaggggctcattggtggcctggaggcccagctgagtgagctccgatgcgagatggaggctcagaaccaggagtacaagatgctgcttgacataaagacacggctgg

SEQ ID NO: 1565 - DNA, 32 bp, Homo sapiens
  source 1..32: mol_type = genomic DNA
cctgatgtgtctatgcatctgtcactccccca

SEQ ID NO: 1566 - DNA, 79 bp, Homo sapiens
  source 1..79: mol_type = genomic DNA
agaggtggcctccaacacagaaatgatccagaccagcaagacggagatcacagacctgagacgcacgatgcaggagctg

SEQ ID NO: 1567 - DNA, 124 bp, Homo sapiens
  source 1..124: mol_type = genomic DNA
ctggccggccaggtcaatgtggagatggacgcagcaccgggtgtggacctgacccgtgtgctggcagagatgagggagcagtacgaggccatggcggagaagaaccgccgggatgtcgaggcct

SEQ ID NO: 1568 - DNA, 27 bp, Homo sapiens
  source 1..27: mol_type = genomic DNA
gtgagagctggcccccatcacccctga

SEQ ID NO: 1569 - DNA, 35 bp, Homo sapiens
  source 1..35: mol_type = genomic DNA
tgacatcaacggcttgcgccgagtcctggatgagc

SEQ ID NO: 1570 - DNA, 77 bp, Homo sapiens
  source 1..77: mol_type = genomic DNA
ctcctcttcctgcattgcccactttacttggccttctcctggctctgactcaggcagccaagacccctcccacttcc

SEQ ID NO: 1571 - DNA, 34 bp, Homo sapiens
  source 1..34: mol_type = genomic DNA
accatcgacaactcccgggtcatcctggagatcg

SEQ ID NO: 1572 - DNA, 187 bp, Homo sapiens
  source 1..187: mol_type = genomic DNA
gttctgtagatccatggctgtgtccaaggtgtgcaggaggcagtgaccatgagttgtccacagtggggctggtggagtgtctctgagagagctattgtcagagctggctgcaccccactgccccactctcctgggcaaccaattcccacaggcaatactgcctccttggtctttcgtgccctggaga

SEQ ID NO: 1573 - DNA, 26 bp, Homo sapiens
  source 1..26: mol_type = genomic DNA
gtgagtcctcggatgtcaaagagagg

SEQ ID NO: 1574 - DNA, 33 bp, Homo sapiens
  source 1..33: mol_type = genomic DNA
caaccagcccagaatgcgactacagccaatact

SEQ ID NO: 1575 - DNA, 26 bp, Homo sapiens
  source 1..26: mol_type = genomic DNA
ctctggcaatgagaaaattaccatgc

SEQ ID NO: 1576 - DNA, 82 bp, Homo sapiens
  source 1..82: mol_type = genomic DNA
gtttgtctcttcagggtcaggaggaggatatgggggtggcatgagggtctgtggctttggtggaggggctggtagtgttttc

SEQ ID NO: 1577 - DNA, 32 bp, Homo sapiens
  source 1..32: mol_type = genomic DNA
ggtggaagccgaagtatctcagcttcttctgc

SEQ ID NO: 1578 - DNA, 116 bp, Homo sapiens
  source 1..116: mol_type = genomic DNA
gaggtcccacaacaccctctgaagggtatataaggagccccagcgtgcagcctggcctggtacctcctgccagcatctcttgggtttgctgagaactcacgggctccagctacctg

SEQ ID NO: 1579 - DNA, 222 bp, Homo sapiens
  source 1..222: mol_type = genomic DNA
gatcggccagtggactcccaaactaagaacacggagctgtcctcttggggagaggctcagggctcggggaagtgaagtccagctgagggcacagttggcctgagctgctctcagtacaggcagaggccttggtagctgtgctgtgatgagagttcgctccctgctgctctcttctggcatggagagatgaacctgtaatccaagtgttaaaaccgtgccctg

SEQ ID NO: 1580 - DNA, 265 bp, Homo sapiens
  source 1..265: mol_type = genomic DNA
cccagccttatcagcggaggtttgccccaacacatcccagaaacgagcaaaggttcagcgccgtgcagttggcaggtgtcgggatcatcagtcatccccttgtcagtcccaagcctgctgggcttttgtgagggtgccaggaacacaggctggaggatggcaggaggggagtagaggtgggaggaggggagtccatctgcagcaccaggtaaggggatggatgctggctcctctggtcacctcagctggaacactactcaaggtc

SEQ ID NO: 1581 - DNA, 1375 bp, Homo sapiens
  source 1..1375: mol_type = genomic DNA
gacagagctttatcttcgcaaggccatcccacctggtgctaatgaggaggctccgggccccacccagatctggagctcacagtagcggtttggactgaaaccagggatttgtgcgtggggcagtgaggggggcagctgccgcccctggcctgggcctgagagtatagagaaagccacctcgaggggctgctggaggagagtcaggtgcagaaggggatctggctggggtccagcccttcctcaccctggggtgaaaggcgagtaattgttcttgagttaattgctggggccacaatgtctgcagaggcttttaatgagctctggatgatctgagtttgattatttttctttcggaggaaaagacaataccctcccacccatgagacaataccacactgtctgtgcccagcattggaggccaggctcactgcgaagatggatgagaaggaacccacccccagccttgctggctggcagttccccttgccagcccagctcagatgcaggaatttggggtctgcaggaaggactctttccctgtgccctgtttggttgagggtgtgaggacctgtttgagtcctggctttgccccttaccagtggtgccacctggcacaagttgcttcacctctccaagtttcaatttcattctttctgaatcttgggtgggggtcaccctctgttgtgaggatgagaggaggtgatggatgcaaaagtgctttgtaaatcacaaagtgcagggtagaagtaaaggattatgctattatagcaaaataagaacctaagaacaacctgcgttgccccataggagctggctatggaaggtcgatgccgttgagcctaagaacatgctcaggctcacagggcatgttctgatgcccaacgacaaagcccctcctggtgagggcactcaggcgcaggtgccggtcatgcaccctggcccctgcatgtctggcacctgggtggggatccaggagggggcaggatgggggctcttgggccacagggcttccctggaagtgagagttgagagcgccccttgccacagggaaacagagacttaaaaaggtaaatgtccacagtcttaccatggtaattggtagggtcaggatttgaacccaggcctcacagtcttaccatgataattgataaagccaggattcaaacccgggcctgagggactccagagccctgtccacttcaccatgctgcaacctgggctaggaatcctcctcctgagtttctgtaagccctggggccaggtccagagggctgagccacacctccaagtggcactgcccacaggtatcaggtgtccctggaaaggtgtccctgagctggtggcagagaaaagggctctcctgagtgttcaactc

SEQ ID NO: 1582 - DNA, 731 bp, Homo sapiens
  source 1..731: mol_type = genomic DNA
gcaggcccaaccctatgagtgatgggggcaagtgagggacactagttccacgcccgcatgctgccaaatgtactcagcaccctgctaaggaggctggagaccccatcacggccatggcaatcccgaaggaggagctgtttcaaggttggttatgaacatgtaaccccagagccccgctgctgtagcctggactgggacccccttctgccccctccctagctgtcctgttctggcctccagcacccacaaaccaccacccccaacttaacttctcaggaagccttggagctggagggagaggcctggctgcacccccagctgggactgcccagaggcgcttgtccctgcccatgaaagcctcccttgtcacagctgaaaccttccctctgcctcaggggcccctggaatgtggctgcggggcggggtctgggcccacacaggtggggcaggtgactgtcaggtctcaggcctgagtgtcaggaatgaagcctgcctttgtgtgtgcacagtgcagggtggggctggactggggacacttttctgtctcagcctggagacctgggataggagggagaggggagtggggaagttgaggggagtgcctttacatcctgctggtcatcgtggccacttcagtctgttgagcatttcctgtgagtcatcttgctccaactgagagtcaggctgagctggagttatttccattttcctgattggtagactaaggctca

SEQ ID NO: 1583 - DNA, 32 bp, Homo sapiens
  source 1..32: mol_type = genomic DNA
cgtctttggtcaggaactttataatgtgctat

SEQ ID NO: 1584 - DNA, 186 bp, Homo sapiens
  source 1..186: mol_type = genomic DNA
ttgcagttccaaattgccatcttcccttgtctcatttgcaagttctcaattgtatttctctcaaatggacaggttccttctttactggaggatttttgtttttatcatattggtttttcattacttctgaatagtcttaattacgtttactaaattctaaaggatttctgtgctattataattagg

SEQ ID NO: 1585 - DNA, 255 bp, Homo sapiens
  source 1..255: mol_type = genomic DNA
accctaagggctacttctgagactgaaaaatcagctttctatttacatgaaacactttgggggtcatgggagtgcacagcattagacagtatttggttcaccctgtaaagtagccaagaaaagatgagaaaaatcaagataggcctggcacactagacatttgcctccaaaagaaataacctacagtcttaagatgtatcataaaaatgttctgccaaggatctaaattaccttgggtttcgcatatgtctatga

SEQ ID NO: 1586 - DNA, 164 bp, Homo sapiens
  source 1..164: mol_type = genomic DNA
gttgtgatcaccacagtccctctggtcagtgagattcagttgatggctgctacagggggtaccgagctctcctgctaccgctgcatcatcccctttgctgtggttgtcttcatcgccggcatcgtggtcaccgcggtggcttacagcttcaattcccatgggtc

SEQ ID NO: 1587 - DNA, 47 bp, Homo sapiens
  source 1..47: mol_type = genomic DNA
tggtgagactgtccagatctagtctgtaaacccagcttagaagcact

SEQ ID NO: 1588 - DNA, 45 bp, Homo sapiens
  source 1..45: mol_type = genomic DNA
ttggaagatattgttacacttcagaccacaaatccccacctcatt

SEQ ID NO: 1589 - DNA, 49 bp, Homo sapiens
  source 1..49: mol_type = genomic DNA
aatttggggacagatcttgattttcaggttagctcaatctcagctttgg

SEQ ID NO: 1590 - DNA, 70 bp, Homo sapiens
  source 1..70: mol_type = genomic DNA
agaagttggacgaagaggctcaggcgttgctgtttcttgtcttccaagtcaagtggttactctggtaatg

SEQ ID NO: 1591 - DNA, 84 bp, Homo sapiens
  source 1..84: mol_type = genomic DNA
atcccaaaccagagcagaccctatagtaaagtatttttacatcttttcctttccccagaagagatccctaacctattgttttat

SEQ ID NO: 1592 - DNA, 139 bp, Homo sapiens
  source 1..139: mol_type = genomic DNA
gtttgcacctttagctttggtaacaggaaagcatgcttttcaacagaataaggtgatattcagagcttcagtgcagttattgggctatcttgcaggcaaagtggtactagaaaatagaggggaattgccctcaagggcc

SEQ ID NO: 1593 - DNA, 146 bp, Homo sapiens
  source 1..146: mol_type = genomic DNA
atgctcctcttaccaagcctgcaacttaaaacctatggtttaaactgtgctttcaattatctggaggaggccagcactgatgagcccatcctgagccagtcattttaaggccagtgctacctaactgagacaaggctaatctggtc

SEQ ID NO: 1594 - DNA, 112 bp, Homo sapiens
  source 1..112: mol_type = genomic DNA
cagtttattatggtattggacaccccatgctccttactgcattggctttgggtaagaaggagtgaaaattagtgtgcgaacctgaaaacctagaatttctgattgggactga

SEQ ID NO: 1595 - DNA, 31 bp, Homo sapiens
  source 1..31: mol_type = genomic DNA
aaaatctacagtcggtgtgaatgtgaactaa

SEQ ID NO: 1596 - DNA, 131 bp, Homo sapiens; identical to SEQ ID NO: 732
  source 1..131: mol_type = genomic DNA

SEQ ID NO: 1597 - DNA, 26 bp, Homo sapiens
  source 1..26: mol_type = genomic DNA
atggcgctggggctgcagcgcgcaag

SEQ ID NO: 1598 - DNA, 62 bp, Homo sapiens
  source 1..62: mol_type = genomic DNA
ggggttttatctggccatgttcccatgggaccctggaaaatgttctaggtcctcagctttcc

SEQ ID NO: 1599 - DNA, 103 bp, Homo sapiens
  source 1..103: mol_type = genomic DNA
atctcaccgccgtgcgcacccactcgtaactcgcacccgggtcctggctgcaccgcatcccctcctgcaccccctggatggcccttcagccaacgggggcctg

SEQ ID NO: 1600 - DNA, 29 bp, Homo sapiens
  source 1..29: mol_type = genomic DNA
caaggatgctcttgggaagtccctggtgg

SEQ ID NO: 1601 - DNA, 31 bp, Homo sapiens
  source 1..31: mol_type = genomic DNA
gtacggcttgcagcccagagtgcccagtgag

SEQ ID NO: 1602 - DNA, 25 bp, Homo sapiens
  source 1..25: mol_type = genomic DNA
tcaagatgaggagccagtagtgagg

SEQ ID NO: 1603 - DNA, 33 bp, Homo sapiens
  source 1..33: mol_type = genomic DNA
cgccacagagaggagcgaggcgccagaggcacc

SEQ ID NO: 1604 - DNA, 32 bp, Homo sapiens
  source 1..32: mol_type = genomic DNA
gtcgaccacggagctgcgcaaggaaaagtccc

SEQ ID NO: 1605 - DNA, 64 bp, Homo sapiens
  source 1..64: mol_type = genomic DNA
tgctgtaccagctggctcacacgctgcccttcgcccgcggcgtcagcgcccacctggacaaggc

SEQ ID NO: 1606 - DNA, 46 bp, Homo sapiens
  source 1..46: mol_type = genomic DNA
atgcgcctcaccatcagctacctgcgcatgcaccgcctctgcgccg

SEQ ID NO: 1607 - DNA, 38 bp, Homo sapiens
  source 1..38: mol_type = genomic DNA
ggaatccaggccactaggatgtacccccacttccttgg

SEQ ID NO: 1608 - DNA, 96 bp, Homo sapiens
  source 1..96: mol_type = genomic DNA
accactggatgcctgctacctgaaggccctggagggcttcgtcatggtgctcaccgccgagggagacatggcttacctgtcggagaatgtcagcaa

SEQ ID NO: 1609 - DNA, 45 bp, Homo sapiens
  source 1..45: mol_type = genomic DNA
ttggtatctgttccttttctctgcctcgttaccccactcctggta

SEQ ID NO: 1610 - DNA, 48 bp, Homo sapiens
  source 1..48: mol_type = genomic DNA
ctggagctcattggacacagcatctttgatttcatccacccctgtgac

SEQ ID NO: 1611 - DNA, 28 bp, Homo sapiens
  source 1..28: mol_type = genomic DNA
gagcttcaggacgccctgaccccccagc

SEQ ID NO: 1612 - DNA, 33 bp, Homo sapiens
  source 1..33: mol_type = genomic DNA
gaggcccccacggagcggtgcttctccttgcgc

SEQ ID NO: 1613 - DNA, 57 bp, Homo sapiens
  source 1..57: mol_type = genomic DNA
atgaagagtacactcaccagccgcgggcgcaccctcaacctcaaggcggccacctgg

SEQ ID NO: 1614 - DNA, 165 bp, Homo sapiens
  source 1..165: mol_type = genomic DNA
tgctgaactgctctggacatatgagggcctacaagccacctgcgcagacttctccagctgggagccctgactcagagcccccgctgcagtgcctggtgctcatctgcgaagccatcccccacccaggcagcctggagcccccactgggccgaggggccttcctca

SEQ ID NO: 1615 - DNA, 41 bp, Homo sapiens
  source 1..41: mol_type = genomic DNA
cgccacagcctggacatgaagttcacctactgtgacgacag

SEQ ID NO: 1616 - DNA, 75 bp, Homo sapiens
  source 1..75: mol_type = genomic DNA
aagtggctggctatagtcccgatgacctgatcggctgttccgcctacgagtacatccacgcgctggactccgatg

SEQ ID NO: 1617 - DNA, 50 bp, Homo sapiens
  source 1..50: mol_type = genomic DNA
gtgcgaagccagctgccacatggcccccagctgacaccaggaccccccag

SEQ ID NO: 1618 - DNA, 110 bp, Homo sapiens
  source 1..110: mol_type = genomic DNA
cccaggatgcactgcctccccacctcaacaccagctccctgctccccaagccccaaggaactgtctccttccttgccccctcatacccagtccccagatatttctctccc

SEQ ID NO: 1619 - DNA, 125 bp, Homo sapiens
  source 1..125: mol_type = genomic DNA
cagtaacagggcagtatcgcttcctggcccggagtggtggctacctgtggacccagacccaggccacagtggtgtcagggggacggggcccccagtcggagagtatcgtctgtgtccatttttta

SEQ ID NO: 1620 - DNA, 246 bp, Homo sapiens
  source 1..246: mol_type = genomic DNA
tgggcctgatctgcatgtgtggacaggtgtgtgtgtgtgtgtgtgtgtgtgcgtatgagcatgcatgtgtatcatgcataagtgtatgtgagggagtgtgcacgtgtacacatatgaggaatgtgtgtcaccatgtaaatgccggtgtgtgtgtctgcatggacacaggtatgtgtatgggtgtgtagactgttaatttttttttttttttttttttttttttttgcgtgaacctctgcttaagtg

SEQ ID NO: 1621 - DNA, 160 bp, Homo sapiens
  source 1..160: mol_type = genomic DNA
gcaaagtggttaggacccattctcaaaaaaaaaaaaaaaaaaaaacctgaaaacagaccaaaaaaaaaaaccacacacacgcaaagatagatggtttgcatatggtaaattctctttatggtacacagttctgtgaatttttgacacacgcatgcagttg

SEQ ID NO: 1622 - DNA, 397 bp, Homo sapiens
  source 1..397: mol_type = genomic DNA
tgcacccggcccatgttgtggtttatatcagtagttcctttgtaaatagtgaacagtattccatggtatgaatagagcacaggttttttttttatccattcaccagttagaagacattgggctgtttccaagtttgggtgattacaaaaaaacagctactgtaaacattctcatacaagattttatgagatcacatgttttcatttctcttgggtaaacagctaggattggaatggatgggttatatagtaagtgtatatttaatctaagaaactgccatggctgggcacagtggctcacgcctgtaatcccagcactttgggaagccaaggaaggaggatgactagagcctctgaggtgaagaccagcctgggcaaagtggttaagactcaaccgc

SEQ ID NO: 1623 - DNA, 26 bp, Homo sapiens
  source 1..26: mol_type = genomic DNA
gacagagttttgcccttgtcactcag

SEQ ID NO: 1624 - DNA, 99 bp, Homo sapiens
  source 1..99: mol_type = genomic DNA
tgaaacccttataggagacaaataaatgtgggcaattattttctgcaaaatgccctccaagcccctgggcgccattgccttctgtaataggacatcacc

SEQ ID NO: 1625 - DNA, 87 bp, Homo sapiens
  source 1..87: mol_type = genomic DNA
aagagaccggagtggtgctgtccctggagcaaacggagcaacactctcgcagacccattcagcggggcgccccctctcagaaggaca

SEQ ID NO: 1626 - DNA, 131 bp, Homo sapiens
  source 1..131: mol_type = genomic DNA
cccggatccttgccttcctgcacccgccttccctgagcgaggctgccctggccgctgacccccgccgtttctgcagccctgacctccgtcgcctcctgggacccatcctggatggggcttcagtagcagcc

SEQ ID NO: 1627 - DNA, 130 bp, Homo sapiens
  source 1..130: mol_type = genomic DNA
tgctctcctaataatgcaacaatcgtcaacacagaagaagacttctgtgaccaaatgtgggcagtttttcccacacaccaagcagcggacaccagctgggtgtcctccaattcaattccggcatcatcta

SEQ ID NO: 1628 - DNA, 67 bp, Homo sapiens
  source 1..67: mol_type = genomic DNA
ccagatgaactacctgtgggcaccgagaatgtgcacagactcttcacctccgggaaagacactgagg

SEQ ID NO: 1629 - DNA, 191 bp, Homo sapiens
  source 1..191: mol_type = genomic DNA
caaactctcagtcagggctacagtcatctggggttagagggttttcttccaagctcacacacatgaggttgttggcaggcctcaatccctcactttgctttggctggaggcctcagttcctcatcacgtgaacctctacatagactccctaagtgtcctcacaacatggcagttggcttccctaaggcaaa

SEQ ID NO: 1630 - DNA, 86 bp, Homo sapiens
  source 1..86: mol_type = genomic DNA
ccagctcaacgccagcgagcagctacccagggcctaccacagacctctgggggctgtcccccggccccgtgctcggagcttccatg

SEQ ID NO: 1631 - DNA, 43 bp, Homo sapiens
  source 1..43: mol_type = genomic DNA
ccagagctcagaggacgaggacgagggagtggagctgctggga

SEQ ID NO: 1632 - DNA, 28 bp, Homo sapiens
  source 1..28: mol_type = genomic DNA
cagcccagaacacgaaaactttctgctc

SEQ ID NO: 1633 - DNA, 50 bp, Homo sapiens
  source 1..50: mol_type = genomic DNA
gggattctctggccctcattacctagctggcttaaacctactgttttata

SEQ ID NO: 1634 - DNA, 55 bp, Homo sapiens
  source 1..55: mol_type = genomic DNA
ctggttgagggtcatacagaaagtcagtgggccagctgagactaaagcctgatct

SEQ ID NO: 1635 - DNA, 53 bp, Homo sapiens
  source 1..53: mol_type = genomic DNA
gtcctcgggcgaaggaagaaggagaagggggatgaggccctggaggaacacaa

SEQ ID NO: 1636 - DNA, 32 bp, Homo sapiens
  source 1..32: mol_type = genomic DNA
agtttccttctgacaggaggaccagccccagg

SEQ ID NO: 1637 - DNA, 34 bp, Homo sapiens
  source 1..34: mol_type = genomic DNA
agcaccccactcctgaacctgaatgagcccctgg

SEQ ID NO: 1638 - DNA, 97 bp, Homo sapiens
  source 1..97: mol_type = genomic DNA
aagtgtaacggggaaataatgcatgcaaggaaaaaggtttggagtagggggatttcagttttaaacagtatgatcagggtggtttcattgagaaggt

SEQ ID NO: 1639 - DNA, 700 bp, Homo sapiens
  source 1..700: mol_type = genomic DNA
agtgcgcttcattacgtctggctaattttttaatttctgtagagaaagaggtcttgctatgttgctcaggctggtctcaaactcctgggctcaagtgatcctcctgcctcagccttccaaagtgctgagattgtgcctggctgtctctgtcttctttggggaaaagcaaggccaatgtagctgaagcagagaggagagaaaggtgagggctgactgcatggagcctctgtggggcattgtgatggctttgaagtcaccttgcttgaggaggctgcctcagggcctttgcatatcctgatccttctgcctggcatacttttccctctgttctttgccatgttaccacatcctttagatctcaaaccaaatattactccttacacaaagccctgcctaacttcatacgctcatggtttataacactccataattacacaggcctttgtgtcataatttgatgactgtctgtcttctcctttgggtatgagaccttcaagggcaggggccagggctgtctgggtccctgctgttctcttctttgtgcacatgggtgggcggtggctaagcacagaggaagttctcagcacatatttgtgaatgaggagctaagattcacgcactcgcactgtgcctagctttgtgctaaatcctctatgcacctgatccaattggcgcttctcactggagtgtcggtcccata

SEQ ID NO: 1640 - DNA, 25 bp, Homo sapiens
  source 1..25: mol_type = genomic DNA
gttttcactttgtcacccagtctgg

SEQ ID NO: 1641 - DNA, 32 bp, Homo sapiens
  source 1..32: mol_type = genomic DNA
accaccacgcccgacagtaaatatgttttgaa

SEQ ID NO: 1642 - DNA, 165 bp, Homo sapiens
  source 1..165: mol_type = genomic DNA
cacagcaagtaaatagcaatgcctggattcaaactagggcagcatctgactctggactcgggttcttcaccgcagccctgaacaccccagagaggttcagagagcagaacgtgcccaagacgtcactgccgtttgaatccagacaggcttgcctcaccacccagg

SEQ ID NO: 1643 - DNA, 31 bp, Homo sapiens
  source 1..31: mol_type = genomic DNA
ctcactgctctctccgtactcagacgaggac

SEQ ID NO: 1644 - DNA, 222 bp, Homo sapiens
  source 1..222: mol_type = genomic DNA
tggtctcagctcagtgacctctgggaggtggtccctggccccctcctccttctctcaggatttctcttggggttctcaatacttggttacctcattatccctttctctgcctctcttggctttattttggggaatcaggggtgaggagggttgggggggtcatatctgtgtttccaggttctggggagaacaatgatccacgggtcaacgtgatcacatttc

SEQ ID NO: 1645 - DNA, 104 bp, Homo sapiens
  source 1..104: mol_type = genomic DNA
ccagtgacttccgattgaggccaaagaccccaagctgcccgccagctctgactgccccttgcgctctgggcttcctgccgcccccagctttgcctggacactga

SEQ ID NO: 1646 - DNA, 544 bp, Homo sapiens
  source 1..544: mol_type = genomic DNA
tgacctgcactggttctagaccacacaacctccaatgtggtctgctttagatcaccttcttcttcttccttcttcctcttcctcttcctcctgctcctcttcctcttcttcttcttttttttttttgacagagtcttgctctgtcacccaggctggagtgcagtggcgcgatttcagcttactgcagcctccgcgccctgggttcaagtgattctcctgcctcaacttcccaaatagccgggactacgggcatgtgccacattgcccggctaatttttgtatttttagtagagatggggtttcaccacgttgtccagtctggtctcgaactcctgacctcaagtgctccacctgcctcagccttccaaagtgctgggattacaggcgtgagccactgcacccggctagaactcactttctccaaatccctctgcttcgaatttcaccgtcttcagctctttctagttctgggcctcaccagcctctcattctgcctgttttcaaaccttacgatccccaaaaattgtctggttctgggcctcta

SEQ ID NO: 1647 - DNA, 1103 bp, Homo sapiens
  source 1..1103: mol_type = genomic DNA
ccggttccagatcttatattcagtgatttcctctggttctggaccccacaactccaagcttcctattggttccagttctcctgatcggtaatacatttggttccaaatccagacctcttaatctctctctttttttttttttttttttgagacagagtcccactctgtcacccaggctggagtacagtggctcaatctcggctcactgcagcctccacctcctgggttcaagcaattcttgggcctcagcctcccaaatagctgggattacaggcatgtgccaccacgcccagctaagttttatatttttagtagagacagtgtttcaccatgttggccaggctggtcttgaactcccgacctcaactgatccacccgcctcagcctcccaaagtgctgaaattacaggagtgagcctggccagacttcttaatttctaaatcacttttgttttagaccttatgaggctcagcttattcttctgcagttctctataaccaagactcattttctctcatcaaaaacaagtacagagagtttgatgtgtttatctcttttttcttcctcttcttttttttttttttcttttttgagatggagtctctctctgttgcccaggctggagtataatggtgccatctaggctcactgcaacctccgcctcctgattcaagtgattctcctgcctcagcctcctaaattggtgggattacaggagcccaccaccacatccggctacctttgtgtattttttagtagagacggggttttgccaagttggaggggctggtcttgaactcttgacctcagatgatccacccgcctcagcctcccaaagtgctgggattacaggcataagccaccgtgcccgaccctgtccttatcttataataaccagttcttctagaaccagacgatgctctagttctcctagattctgaacctcatgacctgtaccactcactagttccagactacacaacttctagaaggtgccacctccagggtcctgattcaagatctggtgatctgctgtttctctggttctagaactgacttacaagtgccttctgattctagacctcattccgtaagttcccttg

SEQ ID NO: 1648 - DNA, 31 bp, Homo sapiens
  source 1..31: mol_type = genomic DNA
cccagcctcctaaatctattctgggcttccc

SEQ ID NO: 1649 - DNA, 207 bp, Homo sapiens
  source 1..207: mol_type = genomic DNA
cactgaacttacccaattccttctttcagtcttaagttttcccattctaaacccctaccctctaggctgtgctgctcctggacttcatgcctctccattctcattgcctacaatctctgtgccccagaaccccctccacttcccaccccagccctccagacatgcacttaccttgactttaccccacatgtttggggcacctggggc

SEQ ID NO: 1650 - DNA, 177 bp, Homo sapiens
  source 1..177: mol_type = genomic DNA
agctgtctgccaccatctatgtgcctcccttaccccccagctttctttctacagatggtgctactcttggtctcccacaggaaaaggcctccccccttcttagccccatttaccccgtttgtggaaggcactgctcgctctgttttgtcagagagtggcctatccagattggtgcta

SEQ ID NO: 1651 - DNA, 226 bp, Homo sapiens
  source 1..226: mol_type = genomic DNA
tcctcccggagtttggaacggctgaagttcaccttccagcccctagcgccgttcgcgccgctaggcctggcttctgaggcggttgcggtgctcggtcgccgcctaggcggggcagggtgcgagcaggggcttcgggccacgcttctcttggcgacaggattttgctgtgaagtccgtccgggaaacggaggaaaaaaagagttgcgggaggctgtcggctaataac

SEQ ID NO: 1652 - DNA, 40 bp, Homo sapiens
  source 1..40: mol_type = genomic DNA
atgccctcaggaagtgtggcgtttgatggaggaaaacaga

SEQ ID NO: 1653 - DNA, 65 bp, Homo sapiens
  source 1..65: mol_type = genomic DNA
tgagggagttcaagagccagtttgtgtttctgtgcttcacaaagccacccttgtctaattcttga

SEQ ID NO: 1654 - DNA, 98 bp, Homo sapiens
  source 1..98: mol_type = genomic DNA
tgatacatatttgccagacttcaagatttcagaaaaggggtgaaagagaagattgcaactttgagtcagacctgtaggcctgatagactgattaaacc

SEQ ID NO: 1655 - DNA, 25 bp, Homo sapiens
  source 1..25: mol_type = genomic DNA
gagtgtgcacttcagtggcgtgatc

SEQ ID NO: 1656 - DNA, 182 bp, Homo sapiens
  source 1..182: mol_type = genomic DNA
catttgggtaagttaatagtcaatttataggccacgtaaatgggaaggattatttccttaaatcaagagattagacaatcattgcttgtcatgaatatttaataaaaatttgagaaagctcagtttcttttgggctgcaaacatagatctagggaaataaatactgcttaactattttgttg

SEQ ID NO: 1657 - DNA, 55 bp, Homo sapiens
  source 1..55: mol_type = genomic DNA
aaggtgacctgctgagaaaagtggtacaaatactgggaaaaacctgctcttctgc

SEQ ID NO: 1658 - DNA, 93 bp, Homo sapiens
  source 1..93: mol_type = genomic DNA
cacaagttaaaagctcttattcctatgatgccccctcggatttcatcaatttttcatccttggatgatgaaggagatactcaaaacatagatt

SEQ ID NO: 1659 - DNA, 96 bp, Homo sapiens
  source 1..96: mol_type = genomic DNA
tactggtagggagctttagtttgcattttaaatgcgtgatagtgatttgttttgcttccttgctgatcagacaatgatgatcttcccttttcacag

SEQ ID NO: 1660 - DNA, 79 bp, Homo sapiens
  source 1..79: mol_type = genomic DNA
ggaactggagggctttttcagggcaaaactcctttgagaaaggctaatcttcagcaagctattgtcacacctttgaaac

SEQ ID NO: 1661 - DNA, 105 bp, Homo sapiens
  source 1..105: mol_type = genomic DNA
gacaacacttactacaaagaggcagaaaaagaaaatcttgtggaacaatccattccgtcaaatgcttgttcttccctggaagttgaggcagccatatcaagaaaa

SEQ ID NO: 1662 - DNA, 36 bp, Homo sapiens
  source 1..36: mol_type = genomic DNA
caagagatgtgccactcctgtaatcatcgatgaaat

SEQ ID NO: 1663 - DNA, 101 bp, Homo sapiens
  source 1..101: mol_type = genomic DNA
ccttgtataccacttgtaagtttcttttctgaatttacactttagattgaatagattaaaattaaaaatggtacatctgtaatatgtttggtgtacctcaa

SEQ ID NO: 1664 - DNA, 58 bp, Homo sapiens
  source 1..58: mol_type = genomic DNA
tccatatgcagtagatttggggaggagggtacaggctatgcttcagggaattgaaaac

SEQ ID NO: 1665 - DNA, 92 bp, Homo sapiens
  source 1..92: mol_type = genomic DNA
agaaggcagtgctcatcaagatactgctgaaaagaatgcatcttccccagagaaagccaagggtagacatactgtgccttgtatgccacctg

SEQ ID NO: 1666 - DNA, 31 bp, Homo sapiens
  source 1..31: mol_type = genomic DNA
gagaagagtatgaaaatgcagcaagaggtgg

SEQ ID NO: 1667 - DNA, 129 bp, Homo sapiens
  source 1..129: mol_type = genomic DNA
atcagtgagccaggtcaccaaatcagttgacttccacttccgcacagatgagcgaatcaaacaacatcctaagaaccaggaggaatataaggaagtgaactttacatctgaactacgaaagcatccttc

SEQ ID NO: 1668 - DNA, 278 bp, Homo sapiens
  source 1..278: mol_type = genomic DNA
ggttggggcagaccagtcaaatctcatgcagttttgttaccagagcaccaacaaaatcagtaataatcgttaagtaaaaatgctagtactaataatctccacttgcatttgtagtcagtatcatcattttttgaaattagttatttgcattcttaaaccctgaggttatgcttctttctttgagatacaggtccttgaagggttttgcttccaattagagaccagttttatcaaaattactggtccaaggaataggaataggcttcttcatcagtctc

SEQ ID NO: 1669 - DNA, 56 bp, Homo sapiens
  source 1..56: mol_type = genomic DNA
ctctgtgccgaatatgtggcttatggtagatgtgagctcttccgtgacatttcatt

SEQ ID NO: 1670 - DNA, 121 bp, Homo sapiens
  source 1..121: mol_type = genomic DNA
gcccgagtgactaagggatgtaccattgttaagcctttcaacctgtcccaaggaaagaaaagaacatttgatgaaacagtttctacatatgtgccccttgcacagcaagttgaagacttcc

SEQ ID NO: 1671 - DNA, 31 bp, Homo sapiens
  source 1..31: mol_type = genomic DNA
atggctcacttcagtgtccaactcctgggct

SEQ ID NO: 1672 - DNA, 54 bp, Homo sapiens
  source 1..54: mol_type = genomic DNA
tgaatcaccacttacaagtaaactgggtcttgcggatctagatgaacatctgtc

SEQ ID NO: 1673 - DNA, 140 bp, Homo sapiens
  source 1..140: mol_type = genomic DNA
ctgttaccctccaaatcttctgtgaccaagatttgcagagacccacagactcctgtactgcaaaccaaacaccgtgcacgggctgtgacctgcaaaagtacagcagagctggaggctgaggagctcgagaaattgcaaca

SEQ ID NO: 1674 - DNA, 25 bp, Homo sapiens
  source 1..25: mol_type = genomic DNA
gtaagtcccactggcagtatctgag

SEQ ID NO: 1675 - DNA, 183 bp, Homo sapiens
  source 1..183: mol_type = genomic DNA
cttgatcccagaatacttgaaggtgggcccatcttgcccaagaaaccacctgtgaaaccacccaccgagcctattggctttgatttggaaattgagaaaagaatccaggagcgagaatcaaagaagaaaacagaggatgaacactttgaatttcattccagaccttgccctactaagattttg

SEQ ID NO: 1676 - DNA, 474 bp, Homo sapiens
  source 1..474: mol_type = genomic DNA
cacctgtttcagatgaggtaaccgaggcacacagaggttatgtagtattcctagagcactcagctagtacatggtggagcaagtaagagttcagacactctagctacagagtctgtgatcctaatacctcattatatgcctctccattacatgatagaattttgacttgcagaaatgcaaatggactggattggcagaacattccaggcagtaggaattacatgataaaaagcctgacggtgggaaacaagaagcttctactgggagctgttagtgggtcagttaagctggagaaaagtttatcaagagccactggaaactgtttcagagaagtgagttgtagtttgataataggctcacaaccacaagtttagagaaaatgtgcaatcaggaagcaaggctacagtcagagaataagcaatggagttaagcacctgcataaatgcgaaagcggcttttagttacatttcagtg

SEQ ID NO: 1677 - DNA, 272 bp, Homo sapiens
  source 1..272: mol_type = genomic DNA
acagggaccgtgtgtatctatattattcactctgtatccctagcccctagcatagtgaccaccacagcacaagcactctgatatcggataactgagtgagtaatagtagaagctgacatgcacctagacactaggaattcaaagatggtataagacacggcccttgtcctcaaagctttcatagtctggtagagcatatagatgtgtaaatgagtaaatatggtaatattaaccaacatatgttcattgaacagttactacggggtcttcta

SEQ ID NO: 1678 - DNA, 48 bp, Homo sapiens
  source 1..48: mol_type = genomic DNA
agtggagatcattttgtgatatctaattgagttgcttactcctttcag

SEQ ID NO: 1679 - DNA, 31 bp, Homo sapiens
  source 1..31: mol_type = genomic DNA
tgttcctgaaaagaaggtacttccaatcacc

SEQ ID NO: 1680 - DNA, 34 bp, Homo sapiens
  source 1..34: mol_type = genomic DNA
cattgaagaacagaattcgaatgcccaccaaaga

SEQ ID NO: 1681 - DNA, 132 bp, Homo sapiens
  source 1..132: mol_type = genomic DNA
gacgaaccggtagtgataaaagctcaacctgtgccacattatggggtgccttttaagccccaaatcccagaggcaagaactgtggaaatatgccctttctcgtttgattctcgagacaaagaacgtcagtta

SEQ ID NO: 1682 - DNA, 110 bp, Homo sapiens
  source 1..110: mol_type = genomic DNA
gtgcccaagttcaaggcacttcccttgcctcattttgacaccattaacctgccagagaagaaggtaaagaatgtgacccagattgaacctttctgcttggagactgacag

SEQ ID NO: 1683 - DNA, 39 bp, Homo sapiens
  source 1..39: mol_type = genomic DNA
gtaggggatggggagagcagccaaaatgttaattgcttg

SEQ ID NO: 1684 - DNA, 319 bp, Homo sapiens
  source 1..319: mol_type = genomic DNA
ttggaggtgggaagaatactttataggtgatactgtatagttcctaatgaatcatgtgtgaaggcagaaaatgtctagttgtttatttttatgatataaagataggtcttaaaagtacctttaaaattttttgttttttttaattgacaaataatagttgtacatattcttggggtacatagtgatgtttcaatatgtataatgtgtaatgatctgatcagggtaattagcatatccataatctcaaacatttatcatttctttgtgtttggaatctttttttttttaatttaaaagtaaactttagcacaccaacatg

SEQ ID NO: 1685 - DNA, 41 bp, Homo sapiens
  source 1..41: mol_type = genomic DNA
cttgtttcaaggctcgtccaaacaccgtcatctctcaggag

SEQ ID NO: 1686 - DNA, 128 bp, Homo sapiens
  source 1..128: mol_type = genomic DNA
ttcaggaaccttttcagctggctactgagaagagagccaaagagcggcaggagctggagaagagaatggctgaggtagaagcccagaaagcccagcagttggaggaggccagactacaggaggaagag

SEQ ID NO: 1687 - DNA, 38 bp, Homo sapiens
  source 1..38: mol_type = genomic DNA
tgggagcatgagcactgacgaacacaaacatgcctctg

SEQ ID NO: 1688 - DNA, 296 bp, Homo sapiens
  source 1..296: mol_type = genomic DNA
aaccatgatgcctttcctaggactgttttttatttatttgtttattttatttatgtaacttattatttcctctggggttaagaagcaccactgagttttgtaattagacaagaatacatagcgaaggacatgggaattaaatggcaactgtatttttgttttaatactgagcccaaactccttggagttacagtgttcgtcgctccaggtaatcctctactaacataattatttagatgttggttatccaaaaagaaacctgaactccacattaaggaccaatctgctaggagggc

SEQ ID NO: 1689 - DNA, 272 bp, Homo sapiens
  source 1..272: mol_type = genomic DNA
tgtactctgggaaattcttagcttgtaacttctctgctatacttgagtacagccctattataccctagtaaatcacacaggacataggtttggcattctttagtgaaagctgagggacttgaggagactgtggcctaaaggaaagctgggggacccaatagagacctgaatagaaacccttttgggctccaaagcacatacacttttccatcataccgtgttgccccccaggccccactccccacacctgaaactagtgactgggacctgta

SEQ ID NO: 1690 - DNA, 72 bp, Homo sapiens
  source 1..72: mol_type = genomic DNA
gtgcataaggcaaatccaatacgcaagtaccagggtctggagataaagtcaagtgaccagcctctgactgtg

SEQ ID NO: 1691 - DNA, 29 bp, Homo sapiens
  source 1..29: mol_type = genomic DNA
ccaaattctccactcgattccactgctaa

SEQ ID NO: 1692 - DNA, 130 bp, Homo sapiens
  source 1..130: mol_type = genomic DNA
tcagctgtgagctgcggataccgcccggcaatgggacctgctcttaacctcaaacctaggaccgtcttgctttgtcattgggcatggagagaacccatttctccagacttttacctacccgtgcctgaga

SEQ ID NO: 1693 - DNA, 25 bp, Homo sapiens
  source 1..25: mol_type = genomic DNA
cagaaaataaagatagttaaatcct

SEQ ID NO: 1694 - DNA, 170 bp, Homo sapiens
  source 1..170: mol_type = genomic DNA
gtcctcttctctgcataccgtgaatttatagttaaggatccctttgctgtgagggtagaaaacctcaccaactgcaccagtgaggaagaagactgcgtggattcatggggagcctcacagcagccacgcagcaggctctgggtggggctgccgttaaggcacgttctttc

SEQ ID NO: 1695 - DNA, 28 bp, Homo sapiens
  source 1..28: mol_type = genomic DNA
ggaaccgtgcagtgtgcattttaagacc

SEQ ID NO: 1696 - DNA, 25 bp, Homo sapiens
  source 1..25: mol_type = genomic DNA
tggcctggaataaatacgttttgtc

SEQ ID NO: 1697 - DNA, 76 bp, Homo sapiens
  source 1..76: mol_type = genomic DNA
atggagtttcaccattttggccaggctggtctcgaactcctgacctcaggtgatctacctgcctcggcctctgaaa

SEQ ID NO: 1698 - DNA, 402 bp, Homo sapiens
  source 1..402: mol_type = genomic DNA
gtgctctgaaacctactttgcctgatattaatatagccactctagttttcttttgattggttttagcatggtatgtctatatttaaagtgcatttttttgtagacagcatataattgggtcttgctttattatttaatattattgttgctgcattttaattggaataaatgcatctattttagccttgacatgctatgctattattttgtgtgtgcgtgtgagtctctctgccccaaaaatatttctttaggagatgaaccaaatgattgttctctgaaatgaataatgcctaaactatgttttcatggcctatcttttcttccctgtcatcttgttgcagtttaattcctttatcaggagtcagttcatatgctatgtgattaagtgctgtttcttccatg

SEQ ID NO: 1699 - DNA, 30 bp, Homo sapiens
  source 1..30: mol_type = genomic DNA
taaatccccgcacctgagcatcggctcaca

SEQ ID NO: 1700 - DNA, 40 bp, Homo sapiens
  source 1..40: mol_type = genomic DNA
atgcctgcttgtcgcctaggcccgctagccgccgccctcc

SEQ ID NO: 1701 - DNA, 31 bp, Homo sapiens
  source 1..31: mol_type = genomic DNA
ctgctgctgttcggcttcaccctagtctcag

SEQ ID NO: 1702 - DNA, 92 bp, Homo sapiens
  source 1..92: mol_type = genomic DNA
ccaggctgaccagaactgcacgcaagagtgcgtctcggacagcgaatgcgccgacaacctcaagtgctgcagcgcgggctgtgccaccttct

SEQ ID NO: 1703 - DNA, 27 bp, Homo sapiens
  source 1..27: mol_type = genomic DNA
ggcggggccgcgctgggctgggaggag

SEQ ID NO: 1704 - DNA, 301 bp, Homo sapiens
  source 1..301: mol_type = genomic DNA
gcagtttccttctcgaaccggccgaagcctgccctgcgggaaagcccggagcctggggcgctcacctctcctcttggagtccctccctgggggcctcccccagccctggggaaagactgggagagcctggcctggcaagattttccccaattcctctgtccaggcggaaaggaactttacagatttaggaaaatgccccgctcatcttaaagatgtgtaagggagcatcggtgagaaaaaaatgttcttgcccaaggtcacaccgccatcccatggctgctggagtcatagtgagggttca

SEQ ID NO: 1705 - DNA, 88 bp, Homo sapiens
  source 1..88: mol_type = genomic DNA
ctggacactgtatcgcccttcgtcgtctttcagtcaatctcttccactctaaggattgagtgagcgcgagctggggactctctcaaag

SEQ ID NO: 1706 - DNA, 41 bp, Homo sapiens
  source 1..41: mol_type = genomic DNA
gcagtctccaccaggctatcagaacagggggtggcttaaac

SEQ ID NO: 1707 - DNA, 31 bp, Homo sapiens
  source 1..31: mol_type = genomic DNA
ctttatccagaatacagcccctgtgactttt

SEQ ID NO: 1708 - DNA, 35 bp, Homo sapiens
  source 1..35: mol_type = genomic DNA
tacggtgacccaagacaccgatcagcagggaggtg

SEQ ID NO: 1709 - DNA, 81 bp, Homo sapiens
  source 1..81: mol_type = genomic DNA
agatttggagagaaagcaggcagcagccagatgagagaggtggaggagcaaaggagggagtctttgctgtttgatggatga

SEQ ID NO: 1710 - DNA, 26 bp, Homo sapiens
  source 1..26: mol_type = genomic DNA
atcaggtggctgtagatgtgtagtgt

SEQ ID NO: 1711 - DNA, 128 bp, Homo sapiens
  source 1..128: mol_type = genomic DNA
gtatctgctccagagtgcactattcctcacggcacagtccctcatggcttcccttggctaggggagggagttccctgacctcttgtgcttcccaggtgagatgatgccctaccctacttctgctcgcc

SEQ ID NO: 1712 - DNA, 322 bp, Homo sapiens
  source 1..322: mol_type = genomic DNA
aaccatgatgtacctcagttgatgaatggatttggctgggcctggctcccctctatctaacctgggaagtggagtgtgattgtgtgtgtgtttgttagtggaaggacgtgtggtttctctctgcatggatgaatgagtgtatttggagggtcatggtgctgagagactgcaactgggattcggtctgtgggtatgagtgaagattataagtgtgtaacccctcacatgtgtactgtactttacactttaagtggcagcatagtgcttaaccatggcagcagcagttaacacatagactctgcagctagatttcttggggttc

SEQ ID NO: 1713 - DNA, 78 bp, Homo sapiens
  source 1..78: mol_type = genomic DNA
ttaggggcttgatacctggcatgtaataagagctaattaagtgttcactgttataatttctcataactacagagtagt

SEQ ID NO: 1714 - DNA, 73 bp, Homo sapiens
  source 1..73: mol_type = genomic DNA
tggcacctaaagacacggaggctctgggagatttctggccctaggccacgaaggcccacttgggactcaagct

SEQ ID NO: 1715 - DNA, 42 bp, Homo sapiens
  source 1..42: mol_type = genomic DNA
ggtcctgtgattccatttgggagcaggaggagggatttgcag

SEQ ID NO: 1716 - DNA, 59 bp, Homo sapiens
  source 1..59: mol_type = genomic DNA
ctcaggtgcccaagatggactcaggcaggcagctctgctgtatgtgaagcccagtgagg

SEQ ID NO: 1717 - DNA, 51 bp, Homo sapiens
  source 1..51: mol_type = genomic DNA
atgctgcaggtacaagttaatctccctgtatcgcctctgcccacttaccct

SEQ ID NO: 1718 - DNA, 106 bp, Homo sapiens
  source 1..106: mol_type = genomic DNA
gtgaacattaactttccccagctcggcctctgtcgggaccagtgccaggtggacagccagtgtcctggccagatgaaatgctgccgcaatggctgtgggaaggtgt

SEQ ID NO: 1719 - DNA, 47 bp, Homo sapiens
  source 1..47: mol_type = genomic DNA
gcctagtctaatggatattgttgttgatggtattgttataattttct

SEQ ID NO: 1720 - DNA, 70 bp, Homo sapiens
  source 1..70: mol_type = genomic DNA
ccaccaccaggctgagcagtgaggagagaaagtttctgcctggccctgcatctggttccagcccacctgc

SEQ ID NO: 1721 - DNA, 28 bp, Homo sapiens
  source 1..28: mol_type = genomic DNA
ccctcttgggctgaccacagcttctccc

SEQ ID NO: 1722 - DNA, 31 bp, Homo sapiens
  source 1..31: mol_type = genomic DNA
gtgggaagaaagactgggatgatgaccaaaa

SEQ ID NO: 1723 - DNA, 52 bp, Homo sapiens
  source 1..52: mol_type = genomic DNA
gaaaactctggagttaaggccaatgaagtaatctctaaactttatgcagtac

SEQ ID NO: 1724 - DNA, 28 bp, Homo sapiens
  source 1..28: mol_type = genomic DNA
aattgaattagccaaacagatcacatca

SEQ ID NO: 1725 - DNA, 26 bp, Homo sapiens
  source 1..26: mol_type = genomic DNA
ggctctacagacaatctgatggatga

SEQ ID NO: 1726 - DNA, 25 bp, Homo sapiens
  source 1..25: mol_type = genomic DNA
gagatactcaggtggtggtttttaa

SEQ ID NO: 1727 - DNA, 67 bp, Homo sapiens
  source 1..67: mol_type = genomic DNA
ctattgctgatactggtgcaaatgtcgtagtaacaggtggcaaagtggcagacatggctcttcatta

SEQ ID NO: 1728 - DNA, 50 bp, Homo sapiens; identical to SEQ ID NO: 88
  source 1..50: mol_type = genomic DNA

SEQ ID NO: 1729 - DNA, 29 bp, Homo sapiens
  source 1..29: mol_type = genomic DNA
gttgataacatcagagtttgtaaaattct

SEQ ID NO: 1730 - DNA, 26 bp, Homo sapiens
  source 1..26: mol_type = genomic DNA
cctggaattagctgaagaacttctga

SEQ ID NO: 1731 - DNA, 71 bp, Homo sapiens
  source 1..71: mol_type = genomic DNA
agaagaggctgtgtatagaaacatacaagcttgcaaggagcttgcccaaaccactcgtacagcatatggac

SEQ ID NO: 1732 - DNA, 30 bp, Homo sapiens
  source 1..30: mol_type = genomic DNA
ggtgaagggactctcgagtgtggtcattga

SEQ ID NO: 1733 - DNA, 26 bp, Homo sapiens
  source 1..26: mol_type = genomic DNA
aaggcctccgtctcctgcatgtcctt

SEQ ID NO: 1734 - DNA, 66 bp, Homo sapiens
  source 1..66: mol_type = genomic DNA
ggtactctacagtgtggtcattgaggacaagttgacgagagagtcccaagtacgtccacggtcagc

SEQ ID NO: 1735 - DNA, 170 bp, Homo sapiens
  source 1..170: mol_type = genomic DNA
cagcaaggaacggaaagttcacattgtaaatatgtagcagagtctgtaatggctcagtcaacgcaaaatgttgactacagtcaattacaggagataatataccctgaatcatcaaaattgggggaaggaggtccagaatcattggggccatcagagcctaaaccacgatc

SEQ ID NO: 1736 - DNA, 67 bp, Homo sapiens
  source 1..67: mol_type = genomic DNA
ctacaatgaactcactggagatgcaaagaaaagtgtggagatggagacaccccaatcgactcgccag

SEQ ID NO: 1737 - DNA, 101 bp, Homo sapiens
  source 1..101: mol_type = genomic DNA
caggaacggagacaatcgtgaaagctgctgatagcctcacaaatcttaagccagtcacttgggttaaaagcatcagaagtttcactattgtaaatttcata

SEQ ID NO: 1738 - DNA, 224 bp, Homo sapiens
  source 1..224: mol_type = genomic DNA
atgggccatagtgacgatggtggttttgtcaaaaagaaaagggggggatatgtaaggaaaagagagatcagactttcactgtgtctatgtagaaaaggaagacataagaaactccattttgatctgtactaagaaaaattgttttgccttgagatgctgttaatctgtaactttagccccaaccctgtgctcacggaaacatgtgctgtaaggtttaagggatc

SEQ ID NO: 1739 - DNA, 302 bp, Homo sapiens
  source 1..302: mol_type = genomic DNA
attttaggcgctggacttgggttcggggcacctggcctttccttgtgtatttctcctactgtctgcctaactatttaatacaataaaagaaaaccagcccctggttcttgtggtgtttccaccctcccgggtccccgctggctgcctggcttcctcccgcagctcctgctgtgtgtgtatgtgtgtgtgtgtgcacatctgtggggcgtatgtgtgttcgtctttgtaattgaggctgcagagtggagagagcaggggttttctctggggacccagagagaaggaggcgttttcaccacagc

SEQ ID NO: 1740 - DNA, 355 bp, Homo sapiens
  source 1..355: mol_type = genomic DNA
cctttgagggagatcaagtctaaatttgaagggagtccaaattcatactggggtaatttattcagattataaagggggaattcagttagtgatcagctccactgttccccggagtgccaatccaggtgatagaattgctcaattactgcttttgccttatgttaaaattggggaaaacaaaaaggaaagaacaggagggtttggaagtaccaaccctgcaggaaaagctgcttattgggctaatcaggtctcagaggatagacccgtgtgtacagtcactattcagggaaagagtttgaaggattagtggatacccaggctgatgtttctgtcatcggcataggtactgcctcag

SEQ ID NO: 1741 - DNA, 395 bp, Homo sapiens
  source 1..395: mol_type = genomic DNA
cagatggcgtataatgccgtaattcaacccatgggggctctcccaccccggttgccctctccagccatggtcccctttaattataattgatctgaaggattgcttttttaccattcctctggcaaaacaggattttgaaaaatttgcttttaccacaccagcctaaataataaagaaccagccaccaggtttcagtggaaagtattgcctcagggaatgcttaatagttcaactatttgtcagctcaagctctgcaaccagttagagacaagttttcagactgttacatcgttcactatgttgatattttgtgtgctgcagaaacgagagacaaattaattgaccgttacacatttctgcagacagaggttgccaacgcgggactgacaataaca

SEQ ID NO: 1742 - DNA, 411 bp, Homo sapiens
  source 1..411: mol_type = genomic DNA
ggttgccgtcattacagtgttaacaagattttaatcagtctattaacattgtatcagattctgcatatgtagtacaggctacaaaggatattgagagagccctaatcaaatacattatggatgatcagttaaacccgctgtttaatttgttacaacaaaatgtaagaaaaagaaatttcccattttatattactcatattcgagcacacactaatttaccagggcctttaactaaagcaaatgaacaagctgacttgctagtatcatctgcattcatggaagcacaagaacttcatgccttgactcatgtaaatgcaataggattaaaaaataaatttgatatcacatggaaacagacaaaaaatattgtacaacattgcacccagtgtcagattctacacctggccactc

SEQ ID NO: 1743 - DNA, 130 bp, Homo sapiens
  source 1..130: mol_type = genomic DNA
aggtcaggccggttctttgctctgaaccctgttttctgttaagatgtttatcaagacaatacatgcaccgctgaacatagacccttatcaggagtttctgattttgctctggtcctgtttcttcagaagc

SEQ ID NO: 1744 - DNA, 152 bp, Homo sapiens
  source 1..152: mol_type = genomic DNA
atgctgccggatgaggtggatgcctggctgtggctctgggagagccaacctcccccagggaacccactttacacaatagcagtggcagcagaggctggcgaggagacaagattcggactctggggagcactgatagcatttcccgagcctca

SEQ ID NO: 1745 - DNA, 207 bp, Homo sapiens
  source 1..207: mol_type = genomic DNA
acgctgtcagcctgtccagaccgttcctctgttttcgcttgttcctactaacagcgagcttccgccaatacttgttctcgttcttggttccgagcgtcccgggagccgggaagggaaggattgtctgcagggattggagcaaatatccagtggggggaaagccgggacttccgcgtcttgccggaagtgacgtgacaatcgcggcca

SEQ ID NO: 1746 - DNA, 34 bp, Homo sapiens
  source 1..34: mol_type = genomic DNA
tggccgggacccggctgtgggaccaacgcttccg

SEQ ID NO: 1747 - DNA, 36 bp, Homo sapiens
  source 1..36: mol_type = genomic DNA
actctgggatctgagcctatcgccctggcctggagc

SEQ ID NO: 1748 - DNA, 30 bp, Homo sapiens
  source 1..30: mol_type = genomic DNA
ttgggttccttaaatcctatgctcctttct

SEQ ID NO: 1749 - DNA, 38 bp, Homo sapiens
  source 1..38: mol_type = genomic DNA
ccctaccgagctgggcagttagccagcccactccaact

SEQ ID NO: 1750 - DNA, 34 bp, Homo sapiens
  source 1..34: mol_type = genomic DNA
cagacttggattatgacatcgaagaggataaact

SEQ ID NO: 1751 - DNA, 71 bp, Homo sapiens
  source 1..71: mol_type = genomic DNA
aaggatgctcagaacctgatcgggatcagcattggaggaggggcccagtactgtccctgcctctatatcgt

SEQ ID NO: 1752 - DNA, 105 bp, Homo sapiens
  source 1..105: mol_type = genomic DNA
agcagccttggacggcacagtggcagctggcgatgagatcaccggtgtcaatggcaggtcaatcaaagggaaaactaaggtggaggtggcgaagatgattcagga

SEQ ID NO: 1753 - DNA, 40 bp, Homo sapiens
  source 1..40: mol_type = genomic DNA
cagagcaggtgtccagaggcagcaacacatgtttctgaga

SEQ ID NO: 1754 - DNA, 63 bp, Homo sapiens
  source 1..63: mol_type = genomic DNA
gaggtgaccatccactacaacaagctgcaggcggaccccaagcagggcatgtccctggacatt

SEQ ID NO: 1755 - DNA, 156 bp, Homo sapiens
  source 1..156: mol_type = genomic DNA
gcccaaaggagaagtgccacagccagccctgccctcccctttatgacaggagaatccagagttacatggctgtgggctctgacctctgaccaagcaaatctgaaaggcctgggaggcctcccggtgctctccctgcatctgttcttgtactctgtc

SEQ ID NO: 1756 - DNA, 88 bp, Homo sapiens
  source 1..88: mol_type = genomic DNA
tgttgaagaaagtcaagcaccggctggtggagaacatgagttcagggaccgcagatgctctgggcctgagccgggccatcctgtgcaa

SEQ ID NO: 1757 - DNA, 494 bp, Homo sapiens
  source 1..494: mol_type = genomic DNA
ctctgcccgtggaactgagaagtcaccatctctgtacccccagaggcctctccagctcccggagggtccacagctgtcagctgggctgtcttagccagtgcccctcaggtcacagatgggaaaatagacttagtgtggggaggtgcctctgcccctgccctcagccccttacccctcaccccagcactctcgcggcccacctcctgcctcctttgtccaggaggtggtgctgctgcccttgcctctgcaggtcctcccttcgtggtggctgcgcaggcgaggggggaggcgtgtacatgcacatttacacacgcatgcacacatgcgcacacactttccctccctggggtggccagcgaaacactcagtccccctcctaccgtcgccagtccgagtttaaaaatagcagcagctctgcagtgtgcctgtggggtagatataaatacttctagaaattgtaggctcagctgggcacactgggctttattggctaa

SEQ ID NO: 1758 - DNA, 49 bp, Homo sapiens
  source 1..49: mol_type = genomic DNA
cttgtcaagaggctagaggagctggagcggaccgctgagctatacaaag

SEQ ID NO: 1759 - DNA, 36 bp, Homo sapiens
  source 1..36: mol_type = genomic DNA
tacgggccttttatgagctgtcgcagactcaccggg

SEQ ID NO: 1760 - DNA, 269 bp, Homo sapiens
  source 1..269: mol_type = genomic DNA
cctgcggggaacatctagatcagctggtctcttaagggccgcaacgatgaacaggccccaccctgtctcctcacactgccactggcagtacacaaggcccttgcttatttatatttctgacaacctgtaactctgggcaggccgactgcagctgaccccagctactgcagaaaatgaagcccagacaaaggagagggccacactgctcccaagtggtggagctgttgttccaatccaggtgtctagactcggaccagtgttctgcctca

SEQ ID NO: 1761 - DNA, 190 bp, Homo sapiens
  source 1..190: mol_type = genomic DNA
caatccagtttcctccaggtgtagactcagctccttcagggggtttagaccagctctcttggaggtgtagcccctgtgcagacattggcttccagcctgccaggccccctgccctgcttctccccaacaaacccctggcttctcttagggggccaagtaggggcagccttcaaggcaaacttgtcctgca

SEQ ID NO: 1762 - DNA, 124 bp, Homo sapiens
  source 1..124: mol_type = genomic DNA
tttggggacgtgttctccgtgatcggggtgcgggagccccagccagctgcgagcgaggcttttgtgaagttcgccgatgcccaccgcagcatcgagaagttcggcattcggcttctgaaaacca

SEQ ID NO: 1763 - DNA, 131 bp, Homo sapiens
  source 1..131: mol_type = genomic DNA
actgagtcacagcttgccctaggcctggcactagtcttctcatccttgagagggacaaggcatcagggagcaccatctggctctgatagtcgagtccaccaacaagggtgacgcatcagtgccattcattg

SEQ ID NO: 1764 - DNA, 88 bp, Homo sapiens
  source 1..88: mol_type = genomic DNA
gacggatctgaacacgtacctcaacaaagccatcccggacactcgcctcaccatcaagaagtacctggacgtgaagtttgagtacctg

SEQ ID NO: 1765 - DNA, 28 bp, Homo sapiens
  source 1..28: mol_type = genomic DNA
ctgctgcgcctgcacaaagaagcatctg

SEQ ID NO: 1766 - DNA, 99 bp, Homo sapiens
  source 1..99: mol_type = genomic DNA
ggactccctgaacacctgcgccagcctctcctgctgcgtgtgggtgatgggggtggagctggggacctggggtgggggtagtagccactctgacagcct

SEQ ID NO: 1767 - DNA, 28 bp, Homo sapiens
  source 1..28: mol_type = genomic DNA
gatggatgacgaggaatacagctgcatt

SEQ ID NO: 1768 - DNA, 329 bp, Homo sapiens
  source 1..329: mol_type = genomic DNA
ctggactctcgttcctggagatttagggccatcttcccagtcccgctcgctgggcctcggggtgctgggcacccggccgggaaccactccctcagtctgggggactcttggagggaaatcggattttcttcactcctatgaggcgcttttaagtgtttgatttttctgctgtcgggatccatttcgtggccagtgttcattgaatgtggcagaggtttgggtttggttttttcctctcttcaaagctatcactgagtgcttctgagaaacactgaagtctcagaaatgaggtctcaggaatgaagaacagccgtggctttgaaagcaca

SEQ ID NO: 1769 - DNA, 103 bp, Homo sapiens
  source 1..103: mol_type = genomic DNA
ggcgagcccctttaccgggtgagcaccggcaactatgagtaccgcctgatcctgcgctgccgccaggaggcgcgcgcccgcttctcccagatgcgcaaggatg

SEQ ID NO: 1770 - DNA, 76 bp, Homo sapiens
  source 1..76: mol_type = genomic DNA
gcctcgtgtccaccatgtccaagtactacaacgactgctacgcagtgctgcgggatgccgacgtcttccccatcga

SEQ ID NO: 1771 - DNA, 43 bp, Homo sapiens
  source 1..43: mol_type = genomic DNA
gtagacctggcgcacaccacattggcctatggcctcaaccagg

SEQ ID NO: 1772 - DNA, 27 bp, Homo sapiens
  source 1..27: mol_type = genomic DNA
gttcacagatggggaggaggaggagga

SEQ ID NO: 1773 - DNA, 38 bp, Homo sapiens
  source 1..38: mol_type = genomic DNA
tggggagccgtccagggatacacgaggggctgctgggc

SEQ ID NO: 1774 - DNA, 30 bp, Homo sapiens
  source 1..30: mol_type = genomic DNA
gtgccccgcggctgtggtgccgggggcagg

SEQ ID NO: 1775 - DNA, 404 bp, Homo sapiens
  source 1..404: mol_type = genomic DNA
gcgacgcataaaggcctgctggcttggggcgcctgcctccctgctcctctgtcctcgcacagcgaacctgggctcctgcccaggacaggcaccagggtcatggcctgggacctggacactggcccctccaccctccctcccctcccggctccccggccagagggagagcttggtctctggacctgccttaggaaggagagggagggcaggaaggaaaagaaaggacttggaggtggcaggagtccgagccctgctccttgtgggcgctcacactgcccccggagcctgctgggagtggggccagccgtggacagctgaggttggggtcaatgcctcctgggcacccttgcctcgccccagaccggcccgtccagtccccatcacacctcggcggcctttattta

SEQ ID NO: 1776 - DNA, 36 bp, Homo sapiens
  source 1..36: mol_type = genomic DNA
tgggttctgggcctgtatcgaataaacacaaacctg

SEQ ID NO: 1777 - DNA, 30 bp, Homo sapiens
  source 1..30: mol_type = genomic DNA
ctcagaggcggccatcaaccgccagatcaa

SEQ ID NO: 1778 - DNA, 103 bp, Homo sapiens
  source 1..103: mol_type = genomic DNA
gtcttactactttgaccacgatgatgtggctttgaagaactttgccaaatactttcttcaccaatctcatgaggagagggaacatgctgaggaactgatgaag

SEQ ID NO: 1779 - DNA, 26 bp, Homo sapiens
  source 1..26: mol_type = genomic DNA
ctgggagcgggctgaatgagatggag

SEQ ID NO: 1780 - DNA, 135 bp, Homo sapiens
  source 1..135: mol_type = genomic DNA
cgcagccaatcagcacctagaggttgggctactttcggccaaaggagaacggggacttgtgggggacgctccctgcgcaccaatgaatgtgcatggagatggagaggcgggcctgcaagtgcgaacaagccaatc

SEQ ID NO: 1781 - DNA, 86 bp, Homo sapiens
  source 1..86: mol_type = genomic DNA
cggccgttaaggacagttgtggcaaaggagaaatggccacagggaatgggcggcggctccacctggggattcctgaggccgtgttt

SEQ ID NO: 1782 - DNA, 285 bp, Homo sapiens
  source 1..285: mol_type = genomic DNA
tggcctctaaatagaccagggtctgaatcctggctctgcttcccagttgctgcttaaccttaagcatattattttaccactttgagcttgagtttctttaactgaaatagggatgacaatacttagagagttgttatgggaaacagagaacatgcttgcagtattgcagtgtagtaggtgtcgaataggtattaatattcatgatgataggaagcaatataccatagtggttagaagtcagacccagtccattccccaaccccgctgaggcagtaatttgttttc

SEQ ID NO: 1783 - DNA, 71 bp, Homo sapiens
  source 1..71: mol_type = genomic DNA
cagtattaaagaagctggatgaacagtaccagaagtataagtttatggaactcaaccttgctcaaaagaaa

SEQ ID NO: 1784 - DNA, 65 bp, Homo sapiens
  source 1..65: mol_type = genomic DNA
gctaaaaggtcagattcctgaaattaaacagactttggaaattctaaaatacatgcagaagaaaa

SEQ ID NO: 1785 - DNA, 90 bp, Homo sapiens
  source 1..90: mol_type = genomic DNA
gagtccaccaactcaatggagaccagattcttgctggcagataacctgtattgcaaagcttcagttcctcctaccgataaaatgtgtctg

SEQ ID NO: 1786 - DNA, 140 bp, Homo sapiens
  source 1..140: mol_type = genomic DNA
tgcatatgttcttcctgtccttacacattctttataaggttgttcccacattgttggagcacagagccattatatactgtttgctctctctctttctctctctcatctttcatttatcctagttcttcgtgtaaatattg

SEQ ID NO: 1787 - DNA, 109 bp, Homo sapiens
  source 1..109: mol_type = genomic DNA
ttgatgaagctcaggcattgttggaaaagaatttatcgactgccacaaagaatcttgattccctggaggaagaccttgactttcttcgagatcaatttactaccacaga

SEQ ID NO: 1788 - DNA, 208 bp, Homo sapiens
  source 1..208: mol_type = genomic DNA
tcatctgacgggtagtgtggaaacttcatccagctatgagatgacgagggcctaggacgggtggcttgtggaaaggaaaagatattaaacgtgtgagaaaaaaacaggatccagtgacttagatgggtacaggagccaaaagtgaggaaatcctctaagatgagtcctacaagcttagttaaatgccatttgttattgctagtactgc

SEQ ID NO: 1789 - DNA, 65 bp, Homo sapiens
  source 1..65: mol_type = genomic DNA
atatggccagggtttataattgggatgtaaaaagaagaaacaaggatgactctaccaagaacaaa

SEQ ID NO: 1790 - DNA, 287 bp, Homo sapiens
  source 1..287: mol_type = genomic DNA
tatggaagctgaatgccggacgctagcacagtttactttttccctttctaatcggctgatgttactctcacttgatgtggttaaaccattttagaggtagagaagacagacagtttgaatatttgtaaacttgtttttctttggtatatttaggacttagtggtcctctgttgctattgtcttctataagtggagtttcatgacttactgcttaacgaataactaactactatgatattctggacattttaggaaatggtaatttgccttgctacacattaagaggg

SEQ ID NO: 1791 - DNA, 194 bp, Homo sapiens
  source 1..194: mol_type = genomic DNA
gcctaaggtgattttgtagttcttaacagttctccagagcatcttgaacaggaatattaagataaatgtgaatctgcaatggctgaaaagagttgtgagcttttttattcatgataaaaccttataggaatagtataaaaaatccctgtggaaagctactagtacattgaccagcgctgggtgatacagattct

SEQ ID NO: 1792 - DNA, 1133 bp, Homo sapiens
  source 1..1133: mol_type = genomic DNA
gctctaagctttgcaagggatcctaaaagaggcggtggaagtgaaaattctgggtctccaagaaaatttctgcacagccagttctccaatcagcctatcaccccttgaaacatcttccctgtgtccctgggggcccctgatgctttctccttgggtgatagtaacatgcagagcacttacacaaagctccctctttggacataccccacgtcgacctgtcacaggcctggctgtagcgagcacctccctatgacgcagaatgcttcttgggaattatcttactcctctggagggttagtccatcaatgttttgcttcttgtcccaatactactgtgaccctctctgatcgcacagaaatcactgcctatcacatatatcctgttaagcactgaagaccctattgaaattagagttctacagatgccaaaagctgtactttccatcaggcagatggcaagcttactgccttgatgcacatctggagccactggagctccttcctctctggttccagcattaaggtggagaactccatgtagcttcttgtcctttcccctcagctgtctttgcttcacaaggttttagcccaaagcaagagtgcaatcccaaagccacagagaaatgaactttccgctacctggaagctttaagtgagtaaatcagcttttcccctctcattcctagaggcacacacctcaaaagttactaggctggagagaccctaccttccagtgacccactcatcccccagccacggagaagagggaagaccaaaaagggagagtgagaaagaggatgagagggatggtcagctgtgaggggagggggcaagtggcccagcaaatgttgatgcctcccttcccatcttgccacacggtctttttcttttgtagcacagcctccattaataactcctcggctgaggatgaagatgtaggcacctttacccccagagccagttccttaattggctggctttctgagatgcagaccaccctagaatctcatctaggttcactagaagttagttaaatcttcctttctctgtctttctcttcattccatcccccaaacccaccaaacactaagggagagctccctttggatgtctgggcagtaaacctagctcatt

SEQ ID NO: 1793 - DNA, 115 bp, Homo sapiens
  source 1..115: mol_type = genomic DNA
agaaaccaaacgatcttcaactctcccagccaagttccagaacccagttgagccaattgagcctgtctggttctcactggccaggaagaaagccaaagcatggagccacatggca

SEQ ID NO: 1794 - DNA, 107 bp, Homo sapiens
  source 1..107: mol_type = genomic DNA
gatcagaggaaacctgaaaggaggaaacattatatggcattccataaacaacataccccaatatcgctggggttccttattgcttgtgtgttatttgctgtggttcc

SEQ ID NO: 1795 - DNA, 60 bp, Homo sapiens
  source 1..60: mol_type = genomic DNA
ccagtgtccataaacaggagaagacagcacagatgaagccacctaagcctacaaaatcag

SEQ ID NO: 1796 - DNA, 151 bp, Homo sapiens
  source 1..151: mol_type = genomic DNA
cctgctggtcaacagtcagattatgctgtctcagagccggtttggataactatggcaaagcagaagcagaagagtttcaaggcccacatttctgtgaaagagctgaaaactaagagcaatgctggagccgatgctgagactaaggagccta

SEQ ID NO: 1797 - DNA, 28 bp, Homo sapiens
  source 1..28: mol_type = genomic DNA
tccagatggcaagcagatatcaagtgga

SEQ ID NO: 1798 - DNA, 140 bp, Homo sapiens
  source 1..140: mol_type = genomic DNA
tttggagttcgactgaaaagagcccctccctcgcagaagtataagagtgagaaacaagataacttcacccagcttgcttcagtgccctcgggcccaatttcatcctctgtaggcaggggacataaaatcagaagcacttc

SEQ ID NO: 1799 - DNA, 764 bp, Homo sapiens
  source 1..764: mol_type = genomic DNA
tcctcaaatttcgagcgggctgctattgaggcagacatttctgggagtccattgcctccccaatatgctacccagttcttaaagaggtctaaagttcaggaaatgacctcacgactagagaaaatggctgttgaaggcacttctaacaaatcaccgattcccaggcgtccgacccagtcattcgtgaaatttatggcacagcaaatcttttcagagagctctgctcttaagaggggcagtgatgtggcacctctgcctcccaatcttccttccaaatctttatcaaagcctgaagtcaagcaccaagttttctcagattcagggagtgctaatcctaagggaggcatttcttcaaagatgctacctatgaagcaccctttacagtccttggggaggcctgaagacccacagaaagttttctcttattcagagagagctcctgggaagtgcagcagttttaaagagcagctgtctcccaggcagctttcccaggccttgaggaaacctgagtatgagcaaaaagtctcccctgtttctgccagttctcctaaagagtggaggaattctaaaaagcagctgcctcccaaacattcttcccaagcctcagataggtctaaattccagccacagatgtcatcaaagggcccagtgaatgtacctgtaaagcagagcagcggtgagaagcacctgccttcaagtagtcctttccagcaacaggttcattcaagttctgtgaatgctgctgctaggcgatctgtttttga

SEQ ID NO: 1800 - DNA, 193 bp, Homo sapiens
  source 1..193: mol_type = genomic DNA
ggctatccaatgtcagcagcatatggaagaagatggagaagaaaaggagcaagtgtttcaggattgagtgggtgtgaattcaaaggaagaagccttaaacaatccagtgaagggtatggcctgggcgatagagctgggtcttcacctaccaataagactgccaggaatgtccctttctcgcacttgtccttag

SEQ ID NO: 1801 - DNA, 109 bp, Homo sapiens
  source 1..109: mol_type = genomic DNA
tggagcatagtcagctattatcagcgctgtatgctggatatgaaactactggatggagctaaggatgcagcagatagtgagggaagaaaggcacaaggggcccttccat

SEQ ID NO: 1802 - DNA, 149 bp, Homo sapiens
  source 1..149: mol_type = genomic DNA
tgttggctccagttgatggcaagctgatttctagcagtatttgataaaaaaattccagttcctcaaattaagttgaatagttatgttacgtttttgccacaaaggatttcacatgtgggtccaaagacaggacattcctaaacacgttt

SEQ ID NO: 1803 - DNA, 72 bp, Homo sapiens
  source 1..72: mol_type = genomic DNA
aaccttccattggtttctgaagaagaaaagagcataaccaaaccaaaagaaatcaacgaaaagaagctggga

SEQ ID NO: 1804 - DNA, 73 bp, Homo sapiens
  source 1..73: mol_type = genomic DNA
ccttccagtgtggttcagtcatttccagggtattttagagggatccctgcagtgtgtcactcagacattagaa

SEQ ID NO: 1805 - DNA, 126 bp, Homo sapiens
  source 1..126: mol_type = genomic DNA
cacagtccttgactgcatttgccacacttgcctctaccagtagcacccagctgcccattggtttcagcaccccagccaccacccagggctgtttggattcttcagctgctcgccacaaaatgactt

SEQ ID NO: 1806 - DNA, 31 bp, Homo sapiens
  source 1..31: mol_type = genomic DNA
ggttacaggctccatcactatcccactggag

SEQ ID NO: 1807 - DNA, 117 bp, Homo sapiens
  source 1..117: mol_type = genomic DNA
atcccacctgttatccaacctgaaataatttctaagaacttggtagaaatctctctcgatgatgagtcacctaagaatccacaaaagaaggctttaccacataagagtttgacagcg

SEQ ID NO: 1808 - DNA, 52 bp, Homo sapiens
  source 1..52: mol_type = genomic DNA
ttctaatggattaagtgacattcagaacaacgaggagattgttaaagaagaa

SEQ ID NO: 1809 - DNA, 95 bp, Homo sapiens
  source 1..95: mol_type = genomic DNA
ctctgcctaaacctaggagtaaggttcctggagttgtgtctggagccatgtcaggagctgtgcttcaaaatgtgcctacaagtgcagtctgggtt

SEQ ID NO: 1810 - DNA, 25 bp, Homo sapiens
  source 1..25: mol_type = genomic DNA
ttccttctatggatccccagagagg

SEQ ID NO: 1811 - DNA, 68 bp, Homo sapiens
  source 1..68: mol_type = genomic DNA
gcagcatggggagcaaagccctatcccatgatagcatcttcatgttgggtcctgagcctgaaagatca

SEQ ID NO: 1812 - DNA, 30 bp, Homo sapiens
  source 1..30: mol_type = genomic DNA
aaagaagccgaagatacccaggaagaagaa

SEQ ID NO: 1813 - DNA, 47 bp, Homo sapiens
  source 1..47: mol_type = genomic DNA
cctacaatggctgaatcactaagtgaaatttctgacagtctggatgt

SEQ ID NO: 1814 - DNA, 106 bp, Homo sapiens
  source 1..106: mol_type = genomic DNA
atgccctgtacccaaggtgatttacagcagggtttccttaaagctaggtatttggagccctcacctcccaggagtcacctggaaggttctggacttgcaggtccct

SEQ ID NO: 1815 - DNA, 78 bp, Homo sapiens
  source 1..78: mol_type = genomic DNA
tgattgctggtaatcttggggatctggccaggatagtgggcccctcacatcatgctagtcagcttctcctactccaag

1. A method comprising:
a) obtaining a biological sample from a subject; and
b) detecting the presence or assaying an expression level in the sample from the subject for a plurality of target sequences, wherein the plurality of target sequences is selected from Table 1 or SEQ ID NOs: 1-1815.

2. The method of claim 1, wherein the plurality of target sequences comprises a coding and/or non-coding target.

3. The method of claim 1, wherein the plurality of target sequences comprises a nucleic acid sequence.

4. The method of claim 3, wherein the nucleic acid sequence is a DNA sequence or an RNA sequence.

5. The method of claim 1, wherein the plurality of target sequences comprises at least 5, 10, 15, 20, 25, 30, 35, 40, 45, 50, 55 or 60 target sequences selected from Table 1 or SEQ ID NOs: 1-1815.

6. The method of claim 1, wherein the subject has cancer.

7. The method of claim 6, wherein the cancer is selected from the group consisting of skin cancer, lung cancer, colon cancer, pancreatic cancer, prostate cancer, liver cancer, thyroid cancer, ovarian cancer, uterine cancer, breast cancer, cervical cancer, kidney cancer, epithelial carcinoma, squamous carcinoma, basal cell carcinoma, melanoma, papilloma, and adenomas.

8. The method of claim 1, further comprising administering a treatment to the subject.

9. The method of claim 8, wherein the treatment is selected from the group consisting of surgery, chemotherapy, radiation therapy, immunotherapy/biological therapy, and photodynamic therapy.

10. The method of claim 1, wherein the biological sample is a urine sample, a blood sample or a prostate tumor sample.

11-19. (canceled)

20. A kit for predicting cancer aggressiveness or risk of metastasis, the kit comprising agents for assaying an expression level of a plurality of genes, wherein said plurality of genes comprises one or more genes selected from Table 1 or SEQ ID NOs: 1-1815.

21. A system for analyzing a cancer, comprising:
a probe set comprising a plurality of target sequences, wherein the plurality of target sequences hybridizes to one or more targets selected from Table 1 or SEQ ID NOs: 1-1815; or the plurality of target sequences comprises one or more targets selected from Table 1 or SEQ ID NOs: 1-1815; and
a computer model or algorithm for analyzing an expression level and/or expression profile of the target hybridized to the probe in a sample from a subject suffering from prostate cancer.

22. A probe set for prognosing or diagnosing cancer in a subject, the probe set comprising a plurality of probes for detecting a plurality of target nucleic acids, wherein the plurality of target nucleic acids comprises one or more gene sequences, or complements thereof, of genes selected from Table 1.
